(19) United States
(12) Patent Application Publication
(10) Pub. No.: US 2017/0369948 A1
(43) Pub. Date: Dec. 28, 2017

(54) METHODS AND COMPOSITIONS FOR DETECTING COLORECTAL NEOPLASIAS

(71) Applicant: Case Western Reserve University, Cleveland, OH (US)

(72) Inventors: Sanford D. Markowitz, Pepper Pike, OH (US); Joseph E. Willis, Shaker Heights, OH (US); Helen Moinova, Beachwood, OH (US); Thomas LaFramboise, Shaker Heights, OH (US); Omar de la Cruz Cabrera, Chagrin Falls, OH (US); Ryan Fecteau, Cleveland Heights, OH (US)

(73) Assignee: Case Western Reserve University, Cleveland, OH (US)

(21) Appl. No.: 15/540,965

(22) PCT Filed: Dec. 31, 2015
(86) PCT No.: PCT/US15/68252

§ 371 Date: Jun. 29, 2017

Related U.S. Application Data
(60) Provisional application No. 62/099,021, filed on Dec. 31, 2014.

(51) Int. Cl. C12Q 1/68

(52) U.S. Cl. CPC C12Q 1/6886; C12Q 2600/106; C12Q 2600/154

(57) ABSTRACT

The disclosure provides methods for identifying genomic loci that are differentially methylated in colorectal neoplasias. Identification of methylated genomic loci has numerous uses, including for example, to characterize disease risk, to predict responsiveness to therapy, to non-invasively diagnose subjects and to treat subjects determined to have colorectal neoplasias.

### RELATED APPLICATIONS

[0001] This application claims the benefit of priority from U.S. provisional application No. 62/099,021, filed Dec. 31, 2014. The disclosure of the foregoing application is hereby incorporated by reference in its entirety.

### FUNDING

[0002] Work described herein was supported by grant nos. UO1CA152756; U54CA163060; T32CA059366; and P50CA150964. The United States Government has certain rights in the invention.

### BACKGROUND

[0003] In 2015, it is estimated that there will be nearly 150,000 new cases of colon and/or rectal cancer, and that nearly 50,000 deaths will result from colorectal cancer. People are more likely to survive cancer if the disease is diagnosed at an early stage of development, since treatment at that time is more likely to be successful. Early detection depends upon availability of high-quality methods. Such methods are also useful for determining patient prognosis, selecting therapy, monitoring response to therapy and selecting patients for additional therapy. Consequently, there is a need for cancer diagnostic methods that are specific, accurate, minimally invasive, technically simple and inexpensive.

[0004] Gastrointestinal cancers affect millions of patients per year. For example, over 15,000 new cases of esophageal cancer were diagnosed in 2010, and there were nearly as many deaths from this cancer alone. Similarly, about 21,000 new cases of stomach cancer were diagnosed in 2010, and over 10,000 deaths resulted from stomach cancer. The occurrence of colorectal cancer (i.e., cancer of the colon or rectum) is even higher. Approximately 40% of individuals with colorectal cancer die. As with other cancers, these rates can be decreased by improved methods for diagnosis. Although methods for detecting colorectal cancer exist, the methods are not ideal. Generally, a combination of endoscopy, isolation of cells (for example, via collection of cells/tissues from a fluid sample or from a tissue sample), and/or imaging technologies are used to identify cancerous cells and tumors. There are also a variety of specific tests conducted for colorectal cancer, but these have limitations. For example, colon cancer may be detected with digital rectal exams (i.e., manual probing of rectum by a physician), which are relatively inexpensive, but are unpleasant and can be inaccurate. Fecal occult blood testing (i.e., detection of blood in stool) is nonspecific because blood in the stool has multiple causes. Colonoscopy and sigmoidoscopy (i.e., direct examination of the colon with a flexible viewing instrument) are both uncomfortable for the patient and expensive. Double-contrast barium enema (i.e., taking X-rays of barium-filled colon) is also an expensive procedure, usually performed by a radiologist.

[0005] Because of the disadvantages of existing methods for detecting or treating colorectal neoplasias/cancers, new methods are needed for colorectal neoplasia/cancer diagnosis and therapy.

### SUMMARY OF THE DISCLOSURE

[0006] In certain aspects, the present disclosure is based in part on the discovery of particular human genomic DNA regions (also referred to herein as informative loci or patches) in which the cytosines within CpG dinucleotides are differentially methylated in tissues from lower gastrointestinal neoplasias, e.g., colorectal neoplasia and unmethylated in normal human tissues. In some embodiments, the neoplasia is a cancer.

[0007] In one embodiment, the method comprises assaying for the presence of differentially methylated genomic loci in a tissue sample or a bodily fluid sample from a subject. Tissue sample may be obtained from biopsies of the lower gastrointestinal tract, including but not limited to the rectum, colon, and terminal ileum. Tissue samples may be obtained as a biopsy, or as a swab or brushing of the lower gastrointestinal tract (e.g., colon), or other organs believed to contain cancerous cells or tissues. Exemplary bodily fluids include blood, serum, plasma, a blood-derived fraction, stool, colonic effluent, or urine. In one embodiment, the method involves methylation-sensitive restriction enzyme(s). In another embodiment, the method involves methylation-specific PCR. In another embodiment, the method involves restriction enzyme/methylation-specific PCR. In yet another embodiment, the method comprises reacting DNA from the sample with a chemical compound that converts non-methylated cytosine bases (also called “conversion-sensitive” cytosines), but not methylated cytosine bases, to a different nucleotide base. In an embodiment, the chemical compound is sodium bisulfite, which converts unmethylated cytosine bases to uracil. The compound-converted DNA is then amplified using a methylation-sensitive polymerase chain reaction (MSP) employing primers that amplify the compound-converted DNA template if cytosine bases within CpG dinucleotides of the DNA from the sample are methylated. Production of a PCR product indicates that the subject has cancer or precancerous adenomas. Alternatively, the compound-converted DNA is amplified by bisulfite specific methylation indifferent PCR primers and methylation of the parental DNA template is inferred by DNA sequence analysis of the bisulfite converted and amplified product. Other methods for assaying for the presence of methylated DNA are known in the art.

[0008] In another embodiment, the present invention provides a detection method of prognosis of a neoplasia (e.g., lower gastrointestinal neoplasia such as a colon neoplasia and/or a rectal neoplasia) in a subject known to have or suspected of having neoplasia. In some embodiments, the neoplasia is cancer. Such method comprises assaying for the presence of methylated informative loci in a tissue sample or bodily fluid from the subject. In certain cases, it is expected that detection of methylated informative loci in a blood fraction is indicative of an advanced state of cancer (e.g., lower gastrointestinal cancer such as colorectal cancer). In other cases, detection of methylated informative loci in a tissue or stool derived sample or sample from other bodily fluids may be indicative of a cancer that will respond to therapeutic agents that demethylate DNA or reactivate expression of genes located within methylated informative loci.

[0009] In another embodiment, the present invention provides a method of monitoring over time the status of neoplasia (e.g., lower gastrointestinal neoplasia such as colorectal neoplasia) in a subject. In some embodiments, the neoplasia is a cancer (e.g., a colon neoplasia and/or a rectal neoplasia).

[0010] In another embodiment, the present invention provides a method of evaluating therapy in a subject having cancer or suspected of having neoplasia (e.g., lower gastrointestinal neoplasia such as colorectal neoplasia). In some embodiments, the neoplasia is a cancer.

[0011] The present invention also relates to oligonucleotide primer sequences for use in assays (e.g., methylation-specific PCR assays or HpaII assays) designed to detect the methylation status of the informative methylated genomic loci.

[0012] The present invention also provides a method of inhibiting or reducing growth of neoplasia cells (e.g., lower gastrointestinal neoplasia such as colorectal neoplasia). In some embodiments, the neoplasia is a cancer.

[0013] In some embodiments, the disclosure provides for a method for detecting colorectal cancer or colorectal neoplasia, comprising: a) obtaining a human sample; and b) assaying said sample for the presence of methylation within a nucleotide sequence spanning one or more of the following chromosomal loci: i) chr6: 163834751-163834941; ii) chr8: 97506516-97506680; iii) chr12: 113494734-113494933; or iv) chr22: 39853180-39853369; wherein methylation of said nucleotide sequence is indicative of colorectal cancer. In some embodiments, the method comprises: a) obtaining a human sample; and b) assaying said sample for the presence of methylation within a nucleotide sequence spanning one or more of the following chromosomal loci: i) chr6: 163834750-163834862; ii) chr8: 97506522-97506632; iii) chr8: 97506528-97506643; iv) chr12: 113494734-113494841; or v) chr22: 39853251-39853365; wherein methylation of said nucleotide sequence is indicative of colorectal cancer.

[0014] In some embodiments, the disclosure provides for a method for detecting colorectal cancer, comprising: a) obtaining a human sample; and b) assaying said sample for the presence of DNA methylation by assay in a bisulfite converted DNA for retention of a cytosine base at any of the Y positions present in one or more of the nucleotide sequences having at least 90% identical to the sequence of any one or more of SEQ ID NOs: 101-200, 401-500, 691-780, 1099-1212, 1351-1374, 1423-1446, 1489-1506, 1577-1602, 1637-1644, 1661-1668, 1681-1684, 1705-1712, 1729-1736 or 1747-1748; wherein methylation of said nucleotide sequence is indicative of colorectal cancer. In some embodiments, the sample is assayed for the presence of DNA methylation by assay in a bisulfite converted DNA for retention of a cytosine base at any of the Y positions present in one or more of the nucleotide sequences having at least 90% identical to the sequence of any one or more of SEQ ID NOs: 1637-1644, 1661-1668, 1681-1684, 1705-1712, 1729-1736 or 1747-1748. In some embodiments, the sample is obtained from a subject suspected of having or is known to have colorectal cancer or colorectal neoplasia. In some embodiments, the assay is methylation-specific PCR. In some embodiments, the method further comprises: a) treating DNA from the sample with a compound that converts a non-methylated cytosine base in the DNA to a different base; b) amplifying a region of the compound converted nucleotide sequence with a forward primer and a reverse primer; and c) analyzing the methylation patterns of said nucleotide sequences. In some embodiments, the method further comprises: a) treating DNA from the sample with a compound that converts a non-methylated cytosine base in the DNA to a different base; b) amplifying a region of the compound converted nucleotide sequence with a forward primer and a reverse primer; and c) detecting the presence and/or amount of the amplified product. In some embodiments, the compound used to treat DNA is a bisulfite compound. In some embodiments, wherein the assay comprises using a methylation-specific restriction enzyme. In some embodiments, the methylation-specific restriction enzyme is selected from the group consisting of: HpaII, SmaI, SacII, EagI, BstUI and BssHII. In some embodiments, the sample is a bodily fluid selected from the group consisting of blood, serum, plasma, a blood-derived fraction, stool, urine and a colonic effluent. In some embodiments, the sample is derived from a tissue. In some embodiments, the sample is a biopsy. In some embodiments, the sample is a brushing.

[0015] In some embodiments, the disclosure provides for a method of monitoring over time a colorectal cancer comprising: a) detecting the methylation status of one or more of the Y positions present in one or more of the nucleotide sequences having at least 90% identical to the sequence of any one or more of SEQ ID NOs: 101-200, 401-500, 691-780, 1099-1212, 1351-1374, 1423, 1489-1506, 1577-1602, 1637-1644, 1661-1668, 1681-1684, 1705-1712, 1729-1736 or 1747-1748 from a sample from a subject for a first time; and b) detecting the methylation status of the nucleotide sequence in a sample from the same subject at a later time; wherein absence of methylation in the nucleotide sequence taken at a later time and the presence of methylation in the nucleotide sequence taken at the first time is indicative of cancer regression, and wherein presence of methylation in the nucleotide sequence taken at a later time and the absence of methylation in the nucleotide sequence taken at the first time is indicative of cancer progression. In some embodiments, the sample is a bodily fluid selected from the group consisting of blood, serum, plasma, a blood-derived fraction, stool, urine and a colonic effluent. In some embodiments, the sample is derived from tissue.

[0016] In some embodiments, the disclosure provides for a method of treating a subject having colorectal cancer or neoplasia, comprising the step of treating the subject with chemotherapy, radiation therapy and/or with cancer resection or neoplasia resection; wherein said subject has been determined to DNA methylation as detected assay in a bisulfite converted DNA for retention of a cytosine base of one or more of the Y positions present in one or more of the nucleotide sequences having at least 90% identical to the sequence of any one or more of SEQ ID NOs: 101-200, 401-500, 691-780, 1099-1212, 1351-1374, 1423-1446, 1489-1506, 1577-1602, 1637-1644, 1661-1668, 1681-1684, 1705-1712, 1729-1736 or 1747-1748.

[0017] In some embodiments, the disclosure provides for a bisulfite converted sequences comprising a nucleotide sequence having at least 90% identical to the sequence of any one or more of SEQ ID NOs: 101-300, 401-600, 691-870, 1099-1326, 1351-1398, 1423-1470, 1489-1524, 1577-1628, 1637-1652, 1661-1676, 1681-1688, 1705-1720, 1729-1744, or 1747-1750, and the reverse complements thereof, including all unique fragments of these sequences and their reverse complements. In some embodiments, the disclosure provides for a panel of bisulfite converted sequences selected from these sequences. In some embodiments, the panel corresponds to the combination of sequence regions comprising any one or more of the following combinations of sequences: 1) UnUp62 and UnUp229; 2) UnUp62, UnUp100, UnUp106, UnUp177, UnUp207, UnUp229 and UnUp307; 3) UnUp106 and UnUp146; 4) UnUp280 and UnUp307; 5) UnUp254 and UnUp307; 6) UnUp146 and UnUp254; 7) UnUp177 and UnUp307; 8) UnUp146 and UnUp307; 9) UnUp106 and UnUp307; 10) UnUp106, UnUp177 and UnUp307; 11) UnUp106, UnUp254, and UnUp307; 12) UnUp106, UnUp280 and UnUp307; 13) UnUp177, UnUp254 and UnUp307; 14) UnUp177, UnUp280 and UnUp307; 15) UnUp106, UnUp146, UnUp280 and UnUp307; 16) UnUp106, UnUp146, UnUp254 and UnUp307; 17) UnUp146, UnUp177, UnUp254 and UnUp307; or 18) UnUp106, UnUp207 and UnUp307. In some embodiments, the panels correspond to the combination of sequence regions corresponding to UnUp106, UnUp146, UnUp207, and UnUp307. In some embodiments, the panel further comprises the vimentin sequence. In some embodiments, the panel corresponds to the combination of sequence regions corresponding to vimentin and UnUp146.

[0018] In some embodiments, the disclosure provides for an oligonucleotide primer or probe that hybridizes to any of the sequences of provided herein. In some embodiments, the oligonucleotide primer or probe comprises a sequence having at least 90% sequence identity to SEQ ID NO: 1759, 1760, 1761 or 1762. In some embodiments, the primers comprise any sequence having at least 90% sequence identity to any one or more of SEQ ID NOs: 1525-1550, 1689-1696 or 1751-1758. In some embodiments, the primers comprise a primer pair of a forward primer and a reverse primer, and wherein the forward primer and reverse primer are used for PCR amplification of any of the bisulfite converted sequences disclosed herein. In some embodiments, the primer pairs correspond to any one or more of the following primer pairs: 1) 1525 and 1537; 2) 1526 and 1538; 3) 1527 and 1539; 4) 1528 and 1540; 5) 1529 and 1541; 6) 1530 and 1542; 7) 1531 and 1543; 8) 1532 and 1544; 9) 1533 and 1545; 10) 1534 and 1546; 11) 1535 and 1547; 12) 1536 and 1548; 13) 1549 and 1550; 14) 1689 and 1693; 15) 1690 and 1694; 16) 1691 and 1695; 17) 1692 and 1696; 18) 1751 and 1755; 19) 1752 and 1756; 20) 1753-1757; 21) 1754-1758; or 22) 1759 and 1760. In some embodiments, the disclosure provides for a panel of primer pairs selected from any of these primer pairs. In some embodiments, the panel corresponds to the combination of primer pairs for amplifying any of the combinations of sequence regions: 1) UnUp62 and UnUp229; 2) UnUp62, UnUp100, UnUp106, UnUp177, UnUp207, UnUp229 and UnUp307; 3) UnUp106 and UnUp146; 4) UnUp280 and UnUp307; 5) UnUp254 and UnUp307; 6) UnUp146 and UnUp254; 7) UnUp177 and UnUp307; 8) UnUp146 and UnUp307; 9) UnUp106 and UnUp307; 10) UnUp106, UnUp177 and UnUp307; 11) UnUp106, UnUp254, and UnUp307; 12) UnUp106, UnUp280 and UnUp307; 13) UnUp177, UnUp254 and UnUp307; 14) UnUp177, UnUp280 and UnUp307; 15) UnUp106, UnUp146, UnUp280 and UnUp307; 16) UnUp106, UnUp146, UnUp254 and UnUp307; 17) UnUp146, UnUp177, UnUp254 and UnUp307; 18) UnUp106, UnUp207 and UnUp307; or 19) UnUp106, UnUp146, UnUp207, and UnUp307. In some embodiments, the panel further comprises the vimentin sequence. In some embodiments, the panel corresponds to the combination of sequence regions corresponding to vimentin and UnUp146.

[0019] In some embodiments, the disclosure provides for a method for selecting an individual to undergo a diagnostic procedure to determine the presence of colon neoplasia, colon adenoma, colon cancer, or recurrence of colon cancer within the body, by obtaining a biological sample from an individual, and determining the presence in DNA from that sample of DNA methylation present in any one or more of the nucleotide sequences having at least 90% identical to the sequence of any one or more of SEQ ID NOs: 1-100, 985-1098, 1327-1350, 1551-1576, 1629-1636, 1697-1704, 1721-1728, and 1745-1746. In some embodiments, the disclosure provides for a method for selecting an individual to undergo a diagnostic procedure to determine the presence of colon neoplasia, colon adenoma, colon cancer, or recurrence of colon cancer within the body, by obtaining a biological sample from an individual, and determining the presence in DNA from that sample of DNA methylation as detected assay in a bisulfite converted DNA for retention of a cytosine base present in any one or more of the nucleotide sequences having at least 90% identical to the sequence of any one or more of SEQ ID NOs: 101-300, 401-600, 691-870, 1099-1326, 1351-1398, 1423-1470, 1489-1524, 1577-1628, 1637-1652, 1661-1676, 1681-1688, 1705-1720, 1729-1744, or 1747-1750. In some embodiments, the disclosure provides for a method for selecting an individual to undergo a treatment for colon neoplasia, colon adenoma, colon cancer, or recurrence of colon cancer, by obtaining a biological sample from an individual, and determining the presence in DNA from that sample of DNA methylation as detected assay in a bisulfite converted DNA for retention of a cytosine base present in any one or more of the nucleotide sequences having at least 90% identical to the sequence of any one or more of SEQ ID NOs: 1-100, 985-1098, 1327-1350, 1551-1576, 1629-1636, 1697-1704, 1721-1728, and 1745-1746. In some embodiments, the disclosure provides for a method for selecting an individual to undergo a treatment for colon neoplasia, colon adenoma, colon cancer, or recurrence of colon cancer, by obtaining a biological sample from an individual, and determining the presence in DNA from that sample of DNA methylation as detected assay in a bisulfite converted DNA for retention of a cytosine base present in any one or more of the nucleotide sequences having at least 90% identical to the sequence of any one or more of SEQ ID NOs: 101-300, 401-600, 691-870, 1099-1326, 1351-1398, 1423-1470, 1489-1524, 1577-1628, 1637-1652, 1661-1688, 1681-1696, 1705-1720, 1729-1744, or 1747-1750. In some embodiments, the DNA methylation is detected by cutting one of the DNA sequences with a methylation-sensitive restriction enzyme. In some embodiments, the DNA methylation is detected by bisulfite converting of DNA from the sample and detecting the presence of any of the bisulfite converted DNA sequences disclosed herein. In some embodiments, the bisulfite converted sequences are detected using any of: DNA sequencing, next generation sequencing, methylation specific PCR, methylation specific PCR combined with a fluorogenic hybridization probe, real time methylation specific PCR. In some embodiments, the bisulfite converted sequences are detected using PCR amplification employing any of the PCR primers or primer pairs disclosed herein. In some embodiments, the biological sample is a tissue sample. In some embodiments, the biological sample is a body fluid. In some embodiments, the body fluid is blood, saliva, spit, stool, or urine or a colonic lavage.

[0020] In some embodiments, the disclosure provides for a method for determining the response of an individual with colorectal cancer to therapy by detection in a body fluid of DNA methylation as detected by assay in a bisulfite converted DNA for retention of a cytosine base in any one or more of the nucleotide sequences having at least 90% identical to the sequence of any one or more of SEQ ID NOs: 1-100, 985-1098, 1327-1350, 1551-1576, 1629-1636, 1697-1704, 1721-1728, and 1745-1746; wherein increasing levels of methylation over time are indicative of disease progression and a need for change to a new therapy, and wherein absence of increase in levels of methylation over time or decrease in levels of methylation over time are indicative that change in therapy is not required. In some embodiments, the disclosure provides for a method for determining the response of an individual with colorectal cancer to therapy by detection in a body fluid of methylation in any one or more of the nucleotide sequences having at least 90% identical to the sequence of any one or more of SEQ ID NOs: 101-300, 401-600, 691-870, 1099-1326, 1351-1398, 1423-1470, 1489-1524, 1577-1628, 1637-1652, 1661-1676, 1681-1688, 1705-1720, 1729-1744, or 1747-1750; wherein increasing levels of methylation over time are indicative of disease progression and a need for change to a new therapy, and wherein absence of increase in levels of methylation over time or decrease in levels of methylation over time are indicative that change in therapy is not required. In some embodiments, the DNA methylation is detected by bisulfite converting DNA from a body fluid and detecting the presence of any of the bisulfite converted DNA sequences disclosed herein.

[0021] In some embodiments, the disclosure provides for a bisulfite-converted nucleotide sequence comprising a sequence having at least 80%, 85%, 90%, 91%, 92%, 93%, 94%, 95%, 96%, 97%, 98%, 99% or 100% identity to any of the following sequences SEQ ID NO: 1705-1720, 1577-1628, 1729-1744, and 1747-1750. In some embodiments, the sequence comprises a sequence having at least 80%, 85%, 90%, 91%, 92%, 93%, 94%, 95%, 96%, 97%, 98%, 99% or 100% identity to any of the following sequences SEQ ID NO: 1705-1720. In some embodiments, the sequence comprises a sequence having at least 80%, 85%, 90%, 91%, 92%, 93%, 94%, 95%, 96%, 97%, 98%, 99% or 100% identity to 1706, 1710, 1714 or 1718.

[0022] In some embodiments, the disclosure provides for a method of treating a subject having a colorectal neoplasia, comprising the step of treating the subject with chemotherapy, radiation therapy and/or with the resection of the neoplasia; and/or with ablation of the neoplasia; wherein said subject has been determined to have methylation in a sequence that is at least 90% identical to the sequence of any one or more of: SEQ ID NOs: 1-100, 985-1098, 1327-1350, 1551-1576, 1629-1636, 1697-1704, 1721-1728, and 1745-1746, or complements or fragments thereof. In some embodiments, the disclosure provides for a method of treating a subject having a colorectal neoplasia, comprising the step of treating the subject with chemotherapy, radiation therapy and/or with the resection of the neoplasia; and/or with ablation of the neoplasia; wherein said subject has been determined to have DNA methylation by assay in a bisulfite converted DNA for retention of a cytosine base of one or more of the Y positions present in one or more of the nucleotide sequences having at least 90% identity to the sequence of any one or more of: SEQ ID NOs: 101-300, 401-600, 691-870, 1099-1326, 1351-1398, 1423-1470, 1489-1524, 1577-1628, 1637-1652, 1661-1688, 1681-1696, 1705-1720, 1729-1744, or 1747-1750.

### BRIEF DESCRIPTION OF THE FIGURES

[0023] FIG. 1 shows a chart summarizing specificity and sensitivity of the methylated colon cancer markers Un-up-146 (in windows 1 and 2); Un-up-207; and Un-up-307 for detecting colon cancer tissue versus normal colon tissue.

[0024] FIGS. 2A and 2B show analysis of sample detection by methylation in the amplicon of Un-Up_146. DNA from matched pairs of colon cancer tumors and normal colon tissue (N/T pairs) or circulating DNA from plasma of colon cancer patients or normal control individuals (plasma) was bisulfite converted. The amplicon of Un_Up_146 was amplified using bisulfite specific methylation indifferent primers, and then analyzed by bisulfite sequencing using Next Generation Sequencing technology. Graphs show the sensitivity (Sens) for detecting a tumor sample or blood sample from a cancer patient, and the specificity (Sp) for not detecting a normal colon tissue or the blood from a control normal patient. FIG. 2A shows data for normal colon and colon tumors (N/T pairs). FIG. 2B shows data from plasma samples. Curves show the percent of samples detected (sensitivity) or not detected (specificity) when individual DNA reads that are called positive based on detection of methylation (i.e. retention of unconverted cytosine residues) at greater than or equal to the cutoff specified on the X-axis (e.g. 6+ designates a DNA read is termed methylated if greater than or equal to 6 CpG cytosines are detected as methylated in between the amplification primers). Curves show the percent of samples that are detected (sensitivity) or rejected (specificity) based on detecting a greater than or equal to percentage of DNA reads as being methylated (Y-axis).

[0025] FIGS. 3A and 3B show comparative performance of assays for methylation of Vimentin (Vim) versus of methylation for Un_Up_146 in the plasma samples of FIGS. 2A and 2B in which both the Vim and the Un_Up_146 amplicons were analyzed by bisulfite specific sequencing as detailed for FIGS. 2A and 2B. In plasma, Vim remained 100% specific at a cutoff of 6+ CpG for calling a DNA read as methylated and 1% methylated reads for calling a sample as methylated. Un_Up_146 remains 100% specific at a cutoff of 6+ CpG for calling a DNA read as methylated and 2% methylated reads for calling a sample as methylated.

[0026] FIG. 4 provides a tabular summary of the sensitivity and specificity of assay of plasma samples for Vim methylation and for Un_Up-146 methylation when the markers were analyzed either individually or in combination (and where the combination is positive if either marker was individually positive). Patients were further categorized as having either early stage (“ES”-stage I or stage II) colon cancer, or as having late stage (“LS”—stage III, stage IV, or metastatic recurrence) colon cancer. FIG. 4 also summarizes the numbers of blood samples from early stage colon cancer patients, late stage colon cancer patients, and normal control individuals that were used in each of the analyses of FIGS. 2-4. Blood samples from colon cancer patients with primary disease were obtained prior to surgery.

### DETAILED DESCRIPTION OF THE INVENTION

### I. Definitions

[0027] For convenience, certain terms employed in the specification, examples, and appended claims are collected here. Unless defined otherwise, all technical and scientific terms used herein have the same meaning as commonly understood by one of ordinary skill in the art to which this invention belongs.

[0028] Although methods and materials similar or equivalent to those described herein can be used in the practice or testing of the present invention, suitable methods and materials are described below. The materials, methods and examples are illustrative only, and are not intended to be limiting. All publications, patents and other documents mentioned herein are incorporated by reference in their entirety.

[0029] Each embodiment of the invention described herein may be taken alone or in combination with one or more other embodiments of the invention.

[0030] Throughout this specification, the word “comprise” or variations such as “comprises” or “comprising” will be understood to imply the inclusion of a stated integer or groups of integers but not the exclusion of any other integer or group of integers.

[0031] The articles “a” and “an” are used herein to refer to one or to more than one (i.e., to at least one) of the grammatical object of the article. By way of example, “an element” means one element or more than one element.

[0032] The terms “adenoma” is used herein to describe any precancerous neoplasia or benign tumor of epithelial tissue, for example, a precancerous neoplasia of the lower gastrointestinal tract.

[0033] The term “colon adenoma” and “polyp” are used herein to describe any precancerous neoplasia of the colon.

[0034] The term “blood-derived fraction” herein refers to a component or components of whole blood. Whole blood comprises a liquid portion (i.e., plasma) and a solid portion (i.e., blood cells). The liquid and solid portions of blood are each comprised of multiple components; e.g., different proteins in plasma or different cell types in the solid portion. One of these components or a mixture of any of these components is a blood-derived fraction as long as such fraction is missing one or more components found in whole blood.

[0035] The term “colon” as used herein is intended to encompass the right colon (including the cecum), the transverse colon, the left colon, and the rectum. “Colon cancer” or “colon neoplasia” may be of any of the foregoing specific colon origin types.

[0036] The terms “colorectal cancer” and “colon cancer” are used interchangeably herein to refer to any cancerous neoplasia of the colon (including the rectum, as defined above).

[0037] A “brushing” of the colon/rectum, as referred to herein, may be obtained using any of the means known in the art. In some embodiments, a brushing is obtained by contacting the colon/rectum with a brush, a sponge, a balloon, or with any other device or substance that contacts the colon/rectum, and obtains a colonic/rectal sample.

[0038] “Cells,” “host cells” or “recombinant host cells” are terms used interchangeably herein. It is understood that such terms refer not only to the particular subject cell but to the progeny or potential progeny of such a cell. Because certain modifications may occur in succeeding generations due to either mutation or environmental influences, such progeny may not, in fact, be identical to the parent cell, but are still included within the scope of the term as used herein.

[0039] The terms “compound”, “test compound,” “agent”, and “molecule” are used herein interchangeably and are meant to include, but are not limited to, peptides, nucleic acids, carbohydrates, small organic molecules, natural product extract libraries, and any other molecules (including, but not limited to, chemicals, metals, and organometallic compounds).

[0040] The term “compound-converted DNA” herein refers to DNA that has been treated or reacted with a chemical compound that converts unmethylated C bases in DNA to a different nucleotide base. For example, one such compound is sodium bisulfite, which converts unmethylated C to U. If DNA that contains conversion-sensitive cytosine is treated with sodium bisulfite, the compound-converted DNA will contain U in place of C. If the DNA which is treated with sodium bisulfite contains only methylcytosine, the compound-converted DNA will not contain uracil in place of the methylcytosine.

[0041] The term “de-methylating agent” as used herein refers to agents that restore activity and/or gene expression of target genes silenced by methylation upon treatment with the agent. Examples of such agents include without limitation 5-azacytidine and 5-aza-2′-deoxycytidine.

[0042] The term “detection” is used herein to refer to any process of observing a marker, or a change in a marker (such as for example the change in the methylation state of the marker), in a biological sample, whether or not the marker or the change in the marker is actually detected. In other words, the act of probing a sample for a marker or a change in the marker, is a “detection” even if the marker is determined to be not present or below the level of sensitivity. Detection may be a quantitative, semi-quantitative or non-quantitative observation.

[0043] The term “differentially methylated nucleotide sequence” refers to a region of a genomic loci that is found to be methylated in a in cancer tissues or cell lines, but not methylated in the normal tissues or cell lines.

[0044] “Gastrointestinal neoplasia” refers to neoplasia of the upper and lower gastrointestinal tract. As commonly understood in the art, the upper gastrointestinal tract includes the esophagus, stomach, and duodenum; the lower gastrointestinal tract includes the remainder of the small intestine and all of the large intestine.

[0045] The terms “healthy”, “normal,” and “non-neoplastic” are used interchangeably herein to refer to a subject or particular cell or tissue that is devoid (at least to the limit of detection) of a disease condition, such as a neoplasia.

[0046] “Homology” or “identity” or “similarity” refers to sequence similarity between two peptides or between two nucleic acid molecules. Homology and identity can each be determined by comparing a position in each sequence which may be aligned for purposes of comparison. When an equivalent position in the compared sequences is occupied by the same base or amino acid, then the molecules are identical at that position; when the equivalent site occupied by the same or a similar amino acid residue (e.g., similar in steric and/or electronic nature), then the molecules can be referred to as homologous (similar) at that position. Expression as a percentage of homology/similarity or identity refers to a function of the number of identical or similar amino acids at positions shared by the compared sequences. A sequence which is “unrelated or “non-homologous” shares less than 40% identity, preferably less than 25% identity with a sequence of the present invention. In comparing two sequences, the absence of residues (amino acids or nucleic acids) or presence of extra residues also decreases the identity and homology/similarity.

[0047] The term “homology” describes a mathematically based comparison of sequence similarities which is used to identify genes or proteins with similar functions or motifs. The nucleic acid and protein sequences of the present invention may be used as a “query sequence” to perform a search against public databases to, for example, identify other family members, related sequences or homologs. Such searches can be performed using the NBLAST and XBLAST programs (version 2.0) of Altschul, et al. (1990) J Mol. Biol. 215:403-10. BLAST nucleotide searches can be performed with the NBLAST program, score=100, wordlength=12 to obtain nucleotide sequences homologous to nucleic acid molecules of the invention. BLAST protein searches can be performed with the XBLAST program, score=50, wordlength=3 to obtain amino acid sequences homologous to protein molecules of the invention. To obtain gapped alignments for comparison purposes, Gapped BLAST can be utilized as described in Altschul et al., (1997) Nucleic Acids Res. 25(17):3389-3402. When utilizing BLAST and Gapped BLAST programs, the default parameters of the respective programs (e.g., XBLAST and BLAST) can be used. See www.ncbi.nlm.nih.gov.

[0048] As used herein, “identity” means the percentage of identical nucleotide or amino acid residues at corresponding positions in two or more sequences when the sequences are aligned to maximize sequence matching, i.e., taking into account gaps and insertions. Identity can be readily calculated by known methods, including but not limited to those described in (Computational Molecular Biology, Lesk, A. M., ed., Oxford University Press, New York, 1988; Biocomputing: Informatics and Genome Projects, Smith, D. W., ed., Academic Press, New York, 1993; Computer Analysis of Sequence Data, Part I, Griffin, A. M., and Griffin, H. G., eds., Humana Press, New Jersey, 1994; Sequence Analysis in Molecular Biology, von Heinje, G., Academic Press, 1987; and Sequence Analysis Primer, Gribskov, M. and Devereux, J., eds., M Stockton Press, New York, 1991; and Carillo, H., and Lipman, D., SIAM J. Applied Math., 48: 1073, 1988). Methods to determine identity are designed to give the largest match between the sequences tested. Moreover, methods to determine identity are codified in publicly available computer programs. Computer program methods to determine identity between two sequences include, but are not limited to, the GCG program package (Devereux, J., et al., Nucleic Acids Research 12(1): 387 (1984)), BLASTP, BLASTN, and FASTA (Altschul, S. F. et al., J. Molec. Biol. 215: 403-410 (1990) and Altschul et al. Nuc. Acids Res. 25: 3389-3402 (1997)). The BLAST X program is publicly available from NCBI and other sources (BLAST Manual, Altschul, S., et al., NCBI NLM NIH Bethesda. Md. 20894; Altschul, S., et al., J. Mol. Biol. 215: 403-410 (1990)). The well known Smith Waterman algorithm may also be used to determine identity.

[0049] The term “including” is used herein to mean, and is used interchangeably with, the phrase “including but not limited to.”

[0050] The term “isolated” as used herein with respect to nucleic acids, such as DNA or RNA, refers to molecules in a form which does not occur in nature. Moreover, an “isolated nucleic acid” is meant to include nucleic acid fragments which are not naturally occurring as fragments and would not be found in the natural state. Any of the nucleic acid sequences disclosed herein may be “isolated.”

[0051] The term “methylation-sensitive PCR” (i.e., MSP) herein refers to a polymerase chain reaction in which amplification of the compound-converted template sequence is performed. Two sets of primers are designed for use in MSP. Each set of primers comprises a forward primer and a reverse primer. One set of primers, called methylation-specific primers (see below), will amplify the compound-converted template sequence if C bases in CpG dinucleotides within the DNA are methylated. Another set of primers, called unmethylation-specific primers (see below), will amplify the compound-converted template sequences if C bases in CpG dinucleotides within the DNA are not methylated.

[0052] As used herein, the term “nucleic acid” refers to polynucleotides such as deoxyribonucleic acid (DNA), and, where appropriate, ribonucleic acid (RNA). The term should also be understood to include, as equivalents, analogs of either RNA or DNA made from nucleotide analogs, and, as applicable to the embodiment being described, single-stranded (such as sense or antisense) and double-stranded polynucleotides.

[0053] “Operably linked” when describing the relationship between two DNA regions simply means that they are functionally related to each other. For example, a promoter or other transcriptional regulatory sequence is operably linked to a coding sequence if it controls the transcription of the coding sequence.

[0054] The term “or” is used herein to mean, and is used interchangeably with, the term “and/or”, unless context clearly indicates otherwise.

[0055] The terms “proteins” and “polypeptides” are used interchangeably herein.

[0056] A “sample” includes any material that is obtained or prepared for detection of a molecular marker or a change in a molecular marker such as for example the methylation state, or any material that is contacted with a detection reagent or detection device for the purpose of detecting a molecular marker or a change in the molecular marker.

[0057] As used herein, “obtaining a sample” includes directly retrieving a sample from a subject to be assayed, or directly retrieving a sample from a subject to be stored and assayed at a later time. Alternatively, a sample may be obtained via a second party. That is, a sample may be obtained via, e.g., shipment, from another individual who has retrieved the sample, or otherwise obtained the sample.

[0058] A “subject” is any organism of interest, generally a mammalian subject, such as a mouse, and preferably a human subject.

[0059] As used herein, the term “specifically hybridizes” refers to the ability of a nucleic acid probe/primer of the invention to hybridize to at least 12, 15, 20, 25, 30, 35, 40, 45, 50 or 100 consecutive nucleotides of a target sequence, or a sequence complementary thereto, or naturally occurring mutants thereof, such that it has less than 15%, preferably less than 10%, and more preferably less than 5% background hybridization to a cellular nucleic acid (e.g., mRNA or genomic DNA) other than the target gene. A variety of hybridization conditions may be used to detect specific hybridization, and the stringency is determined primarily by the wash stage of the hybridization assay. Generally high temperatures and low salt concentrations give high stringency, while low temperatures and high salt concentrations give low stringency. Low stringency hybridization is achieved by washing in, for example, about 2.0×SSC at 50° C., and high stringency is achieved with about 0.2×SSC at 50° C. Further descriptions of stringency are provided below.

[0060] As applied to polypeptides, the term “substantial sequence identity” means that two peptide sequences, when optimally aligned such as by the programs GAP or BESTFIT using default gap, share at least 90 percent sequence identity, preferably at least 95 percent sequence identity, more preferably at least 99 percent sequence identity or more. Preferably, residue positions which are not identical differ by conservative amino acid substitutions. For example, the substitution of amino acids having similar chemical properties such as charge or polarity is not likely to affect the properties of a protein. Examples include glutamine for asparagine or glutamic acid for aspartic acid.

[0061] The term “informative loci”, as used herein, refers to any of the nucleic acid sequences referred to herein that may be associated with an altered methylation pattern in a colon neoplasia as compared to a sample (e.g., a colon tissue sample) from a healthy control subject. In some embodiments, the informative loci are associated with increased methylation in a colon neoplasia as compared to a sample (e.g., a colon tissue sample) from a healthy control subject.

[0062] In some instances, any of the nucleotide sequences disclosed herein contains one or more “Y” positions. Cytosine residues that may be methylated or unmethylated, and hence may be bisulfite converted to T (if unmethylated) or remain as a C (if methylated), are designated with a “Y.”

[0063] The term “UnUp106” or “Un-Up-106” as used herein refers to a nucleotide sequence comprising a sequence having at least 80%, 85%, 90%, 91%, 92%, 93%, 94%, 95%, 96%, 97%, 98%, 99% or 100% identity to the sequence of SEQ ID NO: 1402, 1414, 1697 or 1701, or fragments or reverse complements thereof. In some embodiments, the UnUp106 sequence refers to a bisulfite converted nucleotide sequence comprising a sequence having at least 80%, 85%, 90%, 91%, 92%, 93%, 94%, 95%, 96%, 97%, 98%, 99% or 100% identity to the sequence of SEQ ID NO: 1426, 1438, 1705 or 1709, or fragments or reverse complements thereof. In some embodiments, the UnUp106 sequence refers to a bisulfite converted methylated nucleotide sequence comprising a sequence having at least 80%, 85%, 90° %, 91%, 92%, 93%, 94%, 95%, 96%, 97%, 98%, 99% or 100% identity to the sequence of SEQ ID NO: 1450, 1462, 1713 or 1717, or fragments or reverse complements thereof. In some embodiments, the UnUp106 sequence may be amplified using primers comprising the sequence of SEQ ID NOs: 1689 or 1693, or fragments or reverse complements thereof.

[0064] The term “UnUp35” or “Un-Up-35” as used herein refers to a nucleotide sequence comprising a sequence having at least 80%, 85%, 90%, 91%, 92%, 93%, 94%, 95%, 96%, 97%, 98%, 99% or 100% identity to the sequence of SEQ ID NO: 1399, 1411, 1551 or 1563, or fragments or reverse complements thereof. In some embodiments, the UnUp35 sequence refers to a bisulfite converted nucleotide sequence comprising a sequence having at least 80%, 85%, 90%, 91%, 92%, 93%, 94%, 95%, 96%, 97%, 98%, 99% or 100% identity to the sequence of SEQ ID NO: 1423, 1435, 1577 or 1589, or fragments or reverse complements thereof. In some embodiments, the UnUp35 sequence refers to a bisulfite converted methylated nucleotide sequence comprising a sequence having at least 80%, 85%, 90%, 91%, 92%, 93%, 94%, 95%, 96%, 97%, 98%, 99% or 100% identity to the sequence of SEQ ID NO: 1447, 1459, 1603 or 1615, or fragments or reverse complements thereof. In some embodiments, the UnUp35 sequence may be amplified using primers comprising the sequence of SEQ ID NOs: 1525 or 1537, or fragments or reverse complements thereof.

[0065] The term “UnUp146” or “Un-Up-146” as used herein refers to a nucleotide sequence comprising a sequence having at least 80%, 85%, 90%, 91%, 92%, 93%, 94%, 95%, 96%, 97%, 98%, 99% or 100% identity to the sequence of SEQ ID NO: 1403, 1415, 1698 or 1702, or fragments or reverse complements thereof. In some embodiments, the UnUp146 sequence refers to a bisulfite converted nucleotide sequence comprising a sequence having at least 80%, 85%, 90%, 91%, 92%, 93%, 94%, 95%, 96%, 97%, 98%, 99% or 100% identity to the sequence of SEQ ID NO: 1427, 1439, 1706 or 1710, or fragments or reverse complements thereof. In some embodiments, the UnUp146 sequence refers to a bisulfite converted methylated nucleotide sequence comprising a sequence having at least 80%, 85%, 90%, 91%, 92%, 93%, 94%, 95%, 96%, 97%, 98%, 99% or 100% identity to the sequence of SEQ ID NO: 1451, 1463, 1714 or 1718, or fragments or reverse complements thereof. In some embodiments, the UnUp146 sequence may be amplified using primers comprising the sequence of SEQ ID NOs: 1690 or 1694, or fragments or reverse complements thereof.

[0066] The term “UnUp190” or “Un-Up-190” as used herein refers to a nucleotide sequence comprising a sequence having at least 80%, 85%, 90%, 91%, 92%, 93%, 94%, 95%, 96%, 97%, 98%, 99% or 100% identity to the sequence of SEQ ID NO: 1405, 1417, 1557 or 1569, or fragments or reverse complements thereof. In some embodiments, the UnUp190 sequence refers to a bisulfite converted nucleotide sequence comprising a sequence having at least 80%, 85%, 90%, 91%, 92%, 93%, 94%, 95%, 96%, 97%, 98%, 99% or 100% identity to the sequence of SEQ ID NO: 1429, 1441, 1583 or 1595, or fragments or reverse complements thereof. In some embodiments, the UnUp190 sequence refers to a bisulfite converted methylated nucleotide sequence comprising a sequence having at least 80%, 85%, 90%, 91%, 92%, 93%, 94%, 95%, 96%, 97%, 98%, 99% or 100% identity to the sequence of SEQ ID NO: 1453, 1465, 1609 or 1621, or fragments or reverse complements thereof. In some embodiments, the UnUp190 sequence may be amplified using primers comprising the sequence of SEQ ID NOs: 1531 or 1543, or fragments or reverse complements thereof.

[0067] The term “UnUp207” or “Un-Up-207” as used herein refers to a nucleotide sequence comprising a sequence having at least 80%, 85%, 90%, 91%, 92%, 93%, 94%, 95%, 96%, 97%, 98%, 99% or 100% identity to the sequence of SEQ ID NO: 1406, 1418, 1699 or 1703, or fragments or reverse complements thereof. In some embodiments, the UnUp207 sequence refers to a bisulfite converted nucleotide sequence comprising a sequence having at least 80%, 85%, 90%, 91%, 92%, 93%, 94%, 95%, 96%, 97%, 98%, 99% or 100% identity to the sequence of SEQ ID NO: 1430, 1442, 1707 or 1711, or fragments or reverse complements thereof. In some embodiments, the UnUp207 sequence refers to a bisulfite converted methylated nucleotide sequence comprising a sequence having at least 80%, 85%, 90%, 91%, 92%, 93%, 94%, 95%, 96%, 97%, 98%, 99% or 100% identity to the sequence of SEQ ID NO: 1454, 1466, 1715 or 1719, or fragments or reverse complements thereof. In some embodiments, the UnUp207 sequence may be amplified using primers comprising the sequence of SEQ ID NOs: 1691 or 1695, or fragments or reverse complements thereof.

[0068] The term “UnUp307” or “Un-Up-307” as used herein refers to a nucleotide sequence comprising a sequence having at least 80%, 85%, 90%, 91%, 92%, 93%, 94%, 95%, 96%, 97%, 98%, 99% or 100% identity to the sequence of SEQ ID NO: 1410, 1422, 1700 or 1704, or fragments or reverse complements thereof. In some embodiments, the UnUp307 sequence refers to a bisulfite converted nucleotide sequence comprising a sequence having at least 80%, 85%, 90%, 91%, 92%, 93%, 94%, 95%, 96%, 97%, 98%, 99% or 100% identity to the sequence of SEQ ID NO: 1434, 1446, 1708 or 1712, or fragments or reverse complements thereof. In some embodiments, the UnUp307 sequence refers to a bisulfite converted methylated nucleotide sequence comprising a sequence having at least 80%, 85%, 90%, 91%, 92%, 93%, 94%, 95%, 96%, 97%, 98%, 99% or 100% identity to the sequence of SEQ ID NO: 1458, 1470, 1716 or 1720, or fragments or reverse complements thereof. In some embodiments, the UnUp307 sequence may be amplified using primers comprising the sequence of SEQ ID NOs: 1692 or 1696, or fragments or reverse complements thereof.

[0069] The term “UnUp62” or “Un-Up-62” as used herein refers to a nucleotide sequence comprising a sequence having at least 80%, 85%, 90%, 91%, 92%, 93%, 94%, 95%, 96%, 97%, 98%, 99% or 100% identity to the sequence of SEQ ID NO: 1400, 1412, 1552 or 1564, or fragments or reverse complements thereof. In some embodiments, the UnUp62 sequence refers to a bisulfite converted nucleotide sequence comprising a sequence having at least 80%, 85%, 90%, 91%, 92%, 93%, 94%, 95%, 96%, 97%, 98%, 99% or 100% identity to the sequence of SEQ ID NO: 1424, 1436, 1578 or 1590, or fragments or reverse complements thereof. In some embodiments, the UnUp62 sequence refers to a bisulfite converted methylated nucleotide sequence comprising a sequence having at least 80%, 85%, 90%, 91%, 92%, 93%, 94%, 95%, 96%, 97%, 98%, 99% or 100% identity to the sequence of SEQ ID NO: 1448, 1460, 1604 or 1616, or fragments or reverse complements thereof. In some embodiments, the UnUp62 sequence may be amplified using primers comprising the sequence of SEQ ID NOs: 1526 or 1538, or fragments or reverse complements thereof.

[0070] The term “UnUp229” or “Un-Up-229” as used herein refers to a nucleotide sequence comprising a sequence having at least 80%, 85%, 90%, 91%, 92%, 93%, 94%, 95%, 96%, 97%, 98%, 99% or 100% identity to the sequence of SEQ ID NO: 1407, 1419, 1559 or 1571, or fragments or reverse complements thereof. In some embodiments, the UnUp229 sequence refers to a bisulfite converted nucleotide sequence comprising a sequence having at least 80%, 85%, 90%, 91%, 92%, 93%, 94%, 95%, 96%, 97%, 98%, 99% or 100% identity to the sequence of SEQ ID NO: 1431, 1443, 1585 or 1597, or fragments or reverse complements thereof. In some embodiments, the UnUp229 sequence refers to a bisulfite converted methylated nucleotide sequence comprising a sequence having at least 80%, 85%, 90%, 91%, 92%, 93%, 94%, 95%, 96%, 97%, 98%, 99% or 100% identity to the sequence of SEQ ID NO: 1455, 1467, 1611 or 1623, or fragments or reverse complements thereof. In some embodiments, the UnUp229 sequence may be amplified using primers comprising the sequence of SEQ ID NOs: 1533 or 1545, or fragments or reverse complements thereof.

[0071] The term “UnUp100” or “Un-Up-100” as used herein refers to a nucleotide sequence comprising a sequence having at least 80%, 85%, 90%, 91%, 92%, 93%, 94%, 95%, 96%, 97%, 98%, 99% or 100% identity to the sequence of SEQ ID NO: 1401, 1413, 1553 or 1565, or fragments or reverse complements thereof. In some embodiments, the UnUp100 sequence refers to a bisulfite converted nucleotide sequence comprising a sequence having at least 80%, 85%, 90%, 91%, 92%, 93%, 94%, 95%, 96%, 97%, 98%, 99% or 100% identity to the sequence of SEQ ID NO: 1425, 1437, 1579 or 1591, or fragments or reverse complements thereof. In some embodiments, the UnUp100 sequence refers to a bisulfite converted methylated nucleotide sequence comprising a sequence having at least 80%, 85%, 90%, 91%, 92%, 93%, 94%, 95%, 96%, 97%, 98%, 99% or 100% identity to the sequence of SEQ ID NO: 1449, 1461, 1605 or 1617, or fragments or reverse complements thereof. In some embodiments, the UnUp100 sequence may be amplified using primers comprising the sequence of SEQ ID NOs: 1527 or 1539, or fragments or reverse complements thereof.

[0072] The term “UnUp177” or “Un-Up-177” as used herein refers to a nucleotide sequence comprising a sequence having at least 80%, 85%, 90%, 91%, 92%, 93%, 94%, 95%, 96%, 97%, 98%, 99% or 100% identity to the sequence of SEQ ID NO: 1404, 1416, 1556 or 1568, or fragments or reverse complements thereof. In some embodiments, the UnUp177 sequence refers to a bisulfite converted nucleotide sequence comprising a sequence having at least 80%, 85%, 90%, 91%, 92%, 93%, 94%, 95%, 96%, 97%, 98%, 99% or 100% identity to the sequence of SEQ ID NO: 1428, 1440, 1582 or 1594, or fragments or reverse complements thereof. In some embodiments, the UnUp177 sequence refers to a bisulfite converted methylated nucleotide sequence comprising a sequence having at least 80%, 85%, 90%, 91%, 92%, 93%, 94%, 95%, 96%, 97%, 98%, 99% or 100% identity to the sequence of SEQ ID NO: 1452, 1464, 1608 or 1620, or fragments or reverse complements thereof. In some embodiments, the UnUp177 sequence may be amplified using primers comprising the sequence of SEQ ID NOs: 1530 or 1542, or fragments or reverse complements thereof.

[0073] The term “UnUp280” or “Un-Up-280” as used herein refers to a nucleotide sequence comprising a sequence having at least 80%, 85%, 90%, 91%, 92%, 93%, 94%, 95%, 96%, 97%, 98%, 99% or 100% identity to the sequence of SEQ ID NO: 1409, 1421, 1561 or 1573, or fragments or reverse complements thereof. In some embodiments, the UnUp280 sequence refers to a bisulfite converted nucleotide sequence comprising a sequence having at least 80%, 85%, 90%, 91%, 92%, 93%, 94%, 95%, 96%, 97%, 98%, 99% or 100% identity to the sequence of SEQ ID NO: 1433, 1445, 1587 or 1599, or fragments or reverse complements thereof. In some embodiments, the UnUp280 sequence refers to a bisulfite converted methylated nucleotide sequence comprising a sequence having at least 80%, 85%, 90%, 91%, 92%, 93%, 94%, 95%, 96%, 97%, 98%, 99% or 100% identity to the sequence of SEQ ID NO: 1457, 1469, 1613 or 1625, or fragments or reverse complements thereof. In some embodiments, the UnUp280 sequence may be amplified using primers comprising the sequence of SEQ ID NOs: 1535 or 1547, or fragments or reverse complements thereof.

[0074] The term “UnUp254” or “Un-Up-254” as used herein refers to a nucleotide sequence comprising a sequence having at least 80%, 85%, 90%, 91%, 92%, 93%, 94%, 95%, 96%, 97%, 98%, 99% or 100% identity to the sequence of SEQ ID NO: 1408, 1420, 1560 or 1572, or fragments or reverse complements thereof. In some embodiments, the UnUp254 sequence refers to a bisulfite converted nucleotide sequence comprising a sequence having at least 80%, 85%, 90%, 91%, 92%, 93%, 94%, 95%, 96%, 97%, 98%, 99% or 100% identity to the sequence of SEQ ID NO: 1432, 1444, 1586 or 1598, or fragments or reverse complements thereof. In some embodiments, the UnUp254 sequence refers to a bisulfite converted methylated nucleotide sequence comprising a sequence having at least 80%, 85%, 90%, 91%, 92%, 93%, 94%, 95%, 96%, 97%, 98%, 99% or 100% identity to the sequence of SEQ ID NO: 1456, 1468, 1612 or 1624, or fragments or reverse complements thereof. In some embodiments, the UnUp254 sequence may be amplified using primers comprising the sequence of SEQ ID NOs: 1534 or 1546, or fragments or reverse complements thereof.

[0075] In some embodiments, the disclosure provides for vimentin nucleic acid sequences to be assessed in combination with any of the informative loci described herein. In some embodiments, the disclosure provides for a vimentin nucleic acid sequence is methylated and/or that is bisulfite converted. In some embodiments, the vimentin nucleic acid sequence corresponds to the Vimentin (VIM) locus amplified using primers disclosed in Li et al. (Li M, et al. (2009) Sensitive digital quantification of DNA methylation in clinical samples. Nat Biotechnol 27(9):858-863). These primers correspond to SEQ ID NOs: 1761 and 1762. The amplicons amplified using these primers are as follows:

Vimentin amplicon (+) strand (SEQ ID NO: 1763):
tTYGTttTttTAtYGtAGGATGTTYGGYGGttYGGGtAtYGYGAGtYGGt
YGAGtTttAGtYGGAGtTAYGTGAtTAYGTttAttYGtAttTAtAGttTG
GGtAGt
Vimentin amplicon (-) strand (SEQ ID NO: 1764):
GtTGtttAGGtTGTAGGTGYGGGTGGAYGTAGTtAYGTAGtTtYGGtTGG
AGtTYGGtYGGtTYGYGGTGttYGGGtYGtYGAAtATttTGYGGTAGGAG
GAYGAG.

In some embodiments, the vimentin nucleic acid sequence corresponds to a sequence having at least 80%, 85%, 87%, 90%, 91%, 92%, 93%, 94%, 95%, 96%, 97%, 98%, 99% or 100% identity to SEQ ID NOs: 1763 or 1764, or fragments or complements thereof. In some embodiments, the vimentin nucleic acids correspond to any of those disclosed in US published application no. 2010-0209906, which is incorporated herein in its entirety.

### II. Overview

[0076] This application is based at least in part on the recognition that differential methylation of particular genomic loci may be indicative of neoplasia of the lower gastrointestinal tract, e.g., colon. The present findings demonstrate that methylation at any of these genomic loci may be a useful biomarker of neoplasia in the lower gastrointestinal tract.

[0077] In certain aspects, the disclosure relates to methods for determining whether a patient is likely or unlikely to suffer from a colon neoplasia. A colon neoplasia is any cancerous or precancerous growth located in, or derived from, the colon. The colon is a portion of the intestinal tract that is roughly three feet in length, stretching from the end of the small intestine to the rectum. Viewed in cross section, the colon consists of four distinguishable layers arranged in concentric rings surrounding an interior space, termed the lumen, through which digested materials pass. In order, moving outward from the lumen, the layers are termed the mucosa, the submucosa, the muscularis propria and the subserosa. The mucosa includes the epithelial layer (cells adjacent to the lumen), the basement membrane, the lamina propria and the muscularis mucosae. In general, the “wall” of the colon is intended to refer to the submucosa and the layers outside of the submucosa. The “lining” is the mucosa.

[0078] Precancerous colon neoplasias are referred to as adenomas or adenomatous polyps. Adenomas are typically small mushroom-like or wart-like growths on the lining of the colon and do not invade into the wall of the colon. Adenomas may be visualized through a device such as a colonoscope or flexible sigmoidoscope. Several studies have shown that patients who undergo screening for and removal of adenomas have a decreased rate of mortality from colon cancer. For this and other reasons, it is generally accepted that adenomas are an obligate precursor for the vast majority of colon cancers.

[0079] When a colon neoplasia invades into the basement membrane of the colon, it is considered a colon cancer, as the term “colon cancer” is used herein. In describing colon cancers, this specification will generally follow the so-called “Dukes” colon cancer staging system. The characteristics that describe a cancer are generally of greater significance than the particular term used to describe a recognizable stage. The most widely used staging systems generally use at least one of the following characteristics for staging: the extent of tumor penetration into the colon wall, with greater penetration generally correlating with a more dangerous tumor; the extent of invasion of the tumor through the colon wall and into other neighboring tissues, with greater invasion generally correlating with a more dangerous tumor; the extent of invasion of the tumor into the regional lymph nodes, with greater invasion generally correlating with a more dangerous tumor; and the extent of metastatic invasion into more distant tissues, such as the liver, with greater metastatic invasion generally correlating with a more dangerous disease state.

[0080] “Dukes A” and “Dukes B” colon cancers are neoplasias that have invaded into the wall of the colon but have not spread into other tissues. Dukes A colon cancers are cancers that have not invaded beyond the submucosa. Dukes B colon cancers are subdivided into two groups: Dukes B1 and Dukes B2. “Dukes B1” colon cancers are neoplasias that have invaded up to but not through the muscularis propria. Dukes B2 colon cancers are cancers that have breached completely through the muscularis propria. Over a five year period, patients with Dukes A cancer who receive surgical treatment (i.e., removal of the affected tissue) have a greater than 90% survival rate. Over the same period, patients with Dukes B1 and Dukes B2 cancer receiving surgical treatment have a survival rate of about 85% and 75%, respectively. Dukes A, B1 and B2 cancers are also referred to as T1, T2 and T3-T4 cancers, respectively.

[0081] “Dukes C” colon cancers are cancers that have spread to the regional lymph nodes, such as the lymph nodes of the gut. Patients with Dukes C cancer who receive surgical treatment alone have a 35% survival rate over a five year period, but this survival rate is increased to 60% in patients that receive chemotherapy.

[0082] “Dukes D” colon cancers are cancers that have metastasized to other organs. The liver is the most common organ in which metastatic colon cancer is found. Patients with Dukes D colon cancer have a survival rate of less than 5% over a five year period, regardless of the treatment regimen.

[0083] In general, neoplasia may develop through one of at least three different pathways, termed chromosomal instability, microsatellite instability, and the CpG island methylator phenotype (CIMP). Although there is some overlap, these pathways tend to present somewhat different biological behavior. By understanding the pathway of tumor development, the target genes involved, and the mechanisms underlying the genetic instability, it is possible to implement strategies to detect and treat the different types of neoplasias.

[0084] This disclosure is based at least in part on the recognition that certain target genes may be silenced or inactivated by the differential methylation of CpG islands in the 5′ flanking or promoter regions of the target gene. CpG islands are clusters of cytosine-guanosine residues in a DNA sequence, which are prominently represented in the 5-flanking region or promoter region of about half the genes in our genome. In particular, this application is based at least in part on the recognition that differential methylation of particular genomic loci may be indicative of neoplasia of the lower gastrointestinal tract including, but not limited to, colon neoplasia. The present findings demonstrate that methylation at the informative loci identified herein may be useful biomarkers of neoplasia in the lower gastrointestinal tract.

[0085] As noted above, early detection of neoplasia of the lower gastrointestinal tract coupled with appropriate intervention, is important for increasing patient survival rates. Present systems for screening for colon neoplasia are deficient for a variety of reasons, including a lack of specificity and/or sensitivity (e.g. Fecal Occult Blood Test, flexible sigmoidoscopy) or a high cost and intensive use of medical resources (e.g., colonoscopy). Alternative systems for detection of colon neoplasia would be useful in a wide range of other clinical circumstances as well. For example, patients who receive surgical and/or pharmaceutical therapy for colon cancer may experience a relapse. It would be advantageous to have an alternative system for determining whether such patients have a recurrent or relapsed neoplasia of the lower gastrointestinal tract. As a further example, an alternative diagnostic system would facilitate monitoring an increase, decrease or persistence of neoplasia of the lower gastrointestinal tract in a patient known to have such a neoplasia. A patient undergoing chemotherapy may be monitored to assess the effectiveness of the therapy.

### III. Methylation of Informative Loci as Disease Biomarkers

[0086] The present disclosure relates at least in part to the identification of informative genomic loci whose altered DNA methylation is indicative of the presence of colorectal neoplasias. SEQ ID NOs: 1-100, 985-1098, 1327-1350, 1551-1576, 1629-1636, 1697-1704, 1721-1728, and 1745-1746, correspond to informative loci that were found to be methylated in colorectal cancer. Detection of methylation in certain of these informative genomic loci may be used to select a patient to undergo a diagnostic procedure such as colonoscopy for detection of adenomas, or colorectal cancer. These informative loci may be useful in screening for these conditions. These informative loci may also be useful in surveillance for disease progression or disease recurrence in individuals that have colorectal cancer. Detection of methylation in certain of these informative genomic loci may also be used to select a patient to undergo a diagnostic procedure for or a treatment of colorectal cancer. In some embodiments, detection of methylation of any of these informative genomic loci may be used in combination with an additional diagnostic assay. In some embodiments, detection of methylation status of any of the informative genomic loci described herein may be used in combination with the detection of the methylation status of the vimentin gene. See, e.g., US published application no. 2010-0209906 and Li M, et al. (2009) Sensitive digital quantification of DNA methylation in clinical samples. Nat Biotechnol 27(9):858-863, each of which is incorporated herein in its entirety.

[0087] In some embodiments, any of the nucleotide sequences disclosed herein, or fragments or reverse complements thereof, may contain one or more “Y” residues. Cytosine residues that may be methylated or unmethylated. Cytosines hence may be bisulfite converted to T (if unmethylated) or remain as a C (if methylated). The nucleotide position of bisulfite converted bases, that may be T or C, are, in bisulfite converted DNA sequences, designated with a “Y.” In some embodiments, one or more of the Y residues in any of the sequences disclosed herein (or fragments or reverse complements thereof) designates bisulfite conversion of a methylated C. In some embodiments, one or more of the Y residues in any of the sequences disclosed herein (or fragments or reverse complements thereof) designates bisulfite conversion of an unmethylated C. In some instances, any of the nucleotide sequences disclosed herein contain one or more “Y” positions. In some embodiments, a parental nucleotide sequence is fully unmethylated if the sequence comprises a T at every Y position following bisulfite conversion. In some embodiments, a parental nucleotide sequence is fully methylated if the sequence comprises a C at every Y position following bisulfite conversion. In some embodiments, a parental nucleotide sequence is partially methylated if the sequence comprises at least one C at a Y position and at least one T at a Y position of the sequence following bisulfite conversion. In some embodiments, the bisulfite converted sequences disclosed herein comprise at least one C at a Y position and at least one T at a Y position, i.e., the parental sequence is partially methylated.

[0088] In some embodiments, an informative loci in a subject is considered “methylated” for the purposes of determining whether or not the subject is prone to developing and/or has developed a colon neoplasia if the loci is at least 10%, 20%, 30%, 40%, 50%, 60%, 70%, 80%, 90%, or 100% methylated. In some embodiments, a DNA sample from a subject is treated with bisulfite, and the resulting bisulfite sequence corresponds to any of the nucleotide sequences disclosed herein comprising a “Y” nucleotide. In some embodiments, if at least 1, 2, 3, 4, 5, 6, 7, 8, 9, 10, 11, 12, 13, 14, 15, 16, 17, 18, 19, 20, 21, 22, 23, 24, 25, 26, 27, 28, 29, or 30 of the Y residues of the bisulfite-converted sequence have a C, the sequence is considered “methylated” for the purposes of determining whether or not the subject is prone to developing and/or has developed a colon neoplasia. In some embodiments, a DNA sample from a subject is treated with bisulfite, and the resulting bisulfite sequence corresponds to any of the nucleotide sequences disclosed herein comprising a “Y” nucleotide. In some embodiments, if at least 10%, 20%, 30%, 40%, 50%, 60%, 70%, 80%, 90%, or 100% of the Y residues of the bisulfite-converted sequence have a C, the sequence is considered “methylated” for the purposes of determining whether or not the subject is prone to developing and/or has developed a colon neoplasia. The disclosure provides for informative loci that may be used to assess whether a subject (e.g. a human) has or is prone to developing a colon neoplasia.

[0089] In some embodiments, at least 1, 2, 3, 4, 5, 6, 7, 8, 9, 10, 11, 12, 13, 14, 15, 16, 17, 18, 19, 20, 21, 22, 23, 24, 25, 26, 27, 28, 29, or 30 of the Y residues in any of the sequences disclosed herein (or fragments or reverse complements thereof) correspond to methylated C residues (that when bisulfite converted generate a C base). In some embodiments, at least 1, 2, 3, 4, 5, 6, 7, 8, 9, 10, 11, 12, 13, 14, 15, 16, 17, 18, 19, 20, 21, 22, 23, 24, 25, 26, 27, 28, 29, or 30 of the Y residues in any of the sequences disclosed herein (or fragments or reverse complements thereof) correspond to unmethylated C residues (that when bisulfite converted generate uracil that gives rise to a T base). In some embodiments, at least 10%, 20%, 30%, 40%, 50%, 60%, 70%, 80%, 90%, or 100% of the Y residues in any of the sequences disclosed herein (or fragments or reverse complements thereof) correspond to methylated C residues. In some embodiments, at least 10%, 20%, 30%, 40%, 50%, 60%, 70%, 80%, 90%, or 100% of the Y residues in any of the sequences disclosed herein (or fragments or reverse complements thereof) correspond to unmethylated C residues. In some embodiments, any of the sequences disclosed herein (or fragments or reverse complements thereof) is bisulfite-converted. In some embodiments, at least 1, 2, 3, 4, 5, 6, 7, 8, 9, 10, 11, 12, 13, 14, 15, 16, 17, 18, 19, 20, 21, 22, 23, 24, 25, 26, 27, 28, 29, or 30 of the Y residues in any of the bisulfite-converted sequences disclosed herein (or fragments or reverse complements thereof) correspond to C. In some embodiments, at least 1, 2, 3, 4, 5, 6, 7, 8, 9, 10, 11, 12, 13, 14, 15, 16, 17, 18, 19, 20, 21, 22, 23, 24, 25, 26, 27, 28, 29, or 30 of the Y residues in any of the bisulfite-converted sequences disclosed herein (or fragments or reverse complements thereof) correspond to T. In some embodiments, at least 10%, 20%, 30%, 40%, 50%, 60%, 70%, 80%, 90%, or 100% of the Y residues in any of the bisulfite-converted sequences disclosed herein (or fragments or reverse complements thereof) correspond to C residues. In some embodiments, at least 10%, 20%, 30%, 40%, 50%, 60%, 70%, 80%, 90%, or 100% of the Y residues in any of the bisulfite-converted sequences disclosed herein (or fragments or reverse complements thereof) correspond to T residues.

[0090] In some embodiments, the informative loci include sequences associated with any one or more of the plus strand DNA sequences having at least 80%, 85%, 87%, 909%, 91%, 92%, 93%, 94%, 95%, 96%, 97%, 98%, 99% or 100% identity to any of SEQ ID NOs: 1-50, 301-350, 601-645, 985-1034, 1085-1091, 1327-1338, 1399-1410, 1471-1479, 1551-1562, 1575, 1629-1632, 1653-1656, 1677-1678, 1697-1700, 1721-1724, or 1745, or fragments or complements thereof. In particular embodiments, the informative loci include sequences associated with any one or more of the plus strand DNA sequences having at least 80%, 85%, 87%, 90%, 91%, 92%, 93%, 94%, 95%, 96%, 97%, 98%, 99% or 100% identity to any of SEQ ID NOs: 1327-1338, 1399-1410, 1471-1479, 1551-1562, 1575, 1629-1632, 1653-1656, 1677-1678, 1697-1700, 1721-1724, or 1745, or fragments or complements thereof. In particular embodiments, the informative loci include sequences associated with any one or more of the plus strand DNA sequences having at least 80%, 85%, 87%, 90%, 91%, 92%, 93%, 94%, 95%, 96%, 97%, 98%, 99% or 100% identity to any of SEQ ID NOs: 1629-1632, 1653-1656, 1677-1678, 1697-1700, 1721-1724, or 1745, or fragments or complements thereof. In some embodiments, the informative loci are associated with increased methylation in a colon neoplasia (e.g., colon cancer), as compared to the same sample types taken from a healthy control subject.

[0091] In some embodiments, the informative loci or amplicon of the informative loci are treated with an agent, such as bisulfite. In some embodiments, the informative loci include sequences that have been treated with bisulfite. In some embodiments, the disclosure provides for bisulfite converted sequences of any of the plus DNA strands disclosed herein. In some embodiments, the disclosure provides for bisulfite-treated sequences of any of the plus DNA strands disclosed herein. In some embodiments, the bisulfite-converted plus-strand DNA sequences include any one or more having at least 80%, 85%, 87%, 90%, 91%, 92%, 93%, 94%, 95%, 96%, 97%, 98%, 99% or 100% identity to any of SEQ ID NOs: 101-150, 401-450, 691-735, 1099-1148, 1199-1205, 1351-1362, 1423-1434, 1489-1497, 1577-1588, 1601, 1637-1640, 1661-1664, 1681-1682, 1705-1708, 1729-1732 or 1747, or fragments or complements thereof. In particular embodiments, the bisulfite-converted plus-strand DNA sequences include any one or more having at least 80%, 85%, 87%, 90%, 91%, 92%, 93%, 94%, 95%, 96%, 97%, 98%, 99% or 100% identity to any of SEQ ID NOs: 1351-1362, 1423-1434, 1489-1497, 1577-1588, 1601, 1637-1640, 1661-1664, 1681-1682, 1705-1708, 1729-1732 or 1747, or fragments or complements thereof. In particular embodiments, the bisulfite-converted plus-strand DNA sequences include any one or more having at least 80%, 85%, 87%, 90%, 910%, 92%, 93%, 94%, 95%, 96%, 97%, 98%, 99% or 100% identity to any of SEQ ID NOs: 1637-1640, 1661-1664, 1681-1682, 1705-1708, 1729-1732 or 1747, or fragments or complements thereof.

[0092] In some embodiments, the informative loci include methylated nucleic acid sequences that have been treated with bisulfite. In some embodiments, the bisulfite-converted methylated plus-strand DNA sequences have at least 80%, 85%, 87%, 90%, 91%, 92%, 93%, 94%, 95%, 96%, 97%, 98%, 99% or 100% identity to any of SEQ ID NOs: 201-250, 501-550, 781-825, 1213-1262, 1313-1319, 1375-1386, 1447-1458, 1507-1515, 1603-1614, 1627, 1645-1648, 1669-1672, 1685-1686, 1713-1716, 1737-1740, or 1749, or any fragments or complements thereof. In particular embodiments, the bisulfite-converted methylated plus-strand DNA sequences have at least 80%, 85%, 87%, 90%, 91%, 92%, 93%, 94%, 95%, 96%, 97%, 98%, 99% or 100% identity to any of SEQ ID NOs: 1375-1386, 1447-1458, 1507-1515, 1603-1614, 1627, 1645-1648, 1669-1672, 1685-1686, 1713-1716, 1737-1740, or 1749, or fragments or complements thereof. In particular embodiments, the bisulfite-converted methylated plus-strand DNA sequences have at least 80%, 85%, 87%, 90%, 91%, 92%, 93%, 94%, 95%, 96%, 97%, 98%, 99% or 100% identity to any of SEQ ID NOs: 1645-1648, 1669-1672, 1685-1686, 1713-1716, 1737-1740, or 1749, or fragments or complements thereof.

[0093] In some embodiments, the informative loci include sequences associated with any one or more of the minus strand DNA sequences having at least 80%, 85%, 87%, 90%, 91%, 92%& 93%, 94%, 95%, 96%, 97%, 98%, 99% or 100% identity to any of SEQ ID NOs: 51-100, 351-400, 646-690, 1033-1084, 1092-1098, 1339-1350, 1411-1422, 1480-1488, 1563-1574, 1576, 1633-1636, 1657-1660, 1679-1680, 1701-1704, 1725-1728 or 1746, or fragments or complements thereof. In particular embodiments, the informative loci include sequences associated with any one or more of the minus strand DNA sequences having at least 80%, 85%, 87%, 90%, 91%, 92%, 93%, 94%, 95%, 96%, 97%, 98%, 99% or 100% identity to any of SEQ ID NOs: 1339-1350, 1411-1422, 1480-1488, 1563-1574, 1576, 1633-1636, 1657-1660, 1679-1680, 1701-1704, 1725-1728 or 1746, or fragments or complements thereof. In particular embodiments, the informative loci include sequences associated with any one or more of the minus strand DNA sequences having at least 80%, 85%, 87%, 90%, 91%, 92%, 93%, 94%, 95%, 96%, 97%, 98%, 99% or 100% identity to any of SEQ ID NOs: 1633-1636, 1657-1660, 1679-1680, 1701-1704, 1725-1728 or 1746, or fragments or complements thereof. In some embodiments, the informative loci are associated with increased methylation in a colon neoplasia (e.g., colon cancer), as compared to the same sample types taken from a healthy control subject.

[0094] In some embodiments, the informative loci or amplicon of the informative loci are treated with an agent, such as bisulfite. In some embodiments, the informative loci include sequences that have been treated with bisulfite. In some embodiments, the disclosure provides for bisulfite converted sequences of any of the minus DNA strands disclosed herein. In some embodiments, the disclosure provides for bisulfite-treated sequences of any of the minus DNA strands disclosed herein. In some embodiments, the bisulfite-converted minus-strand DNA sequences include any one or more having at least 80%, 85%, 87%, 90%, 91%, 92%, 93%, 94%, 95%, 96%, 97%, 98%, 99% or 100% identity to any of SEQ ID NOs: 151-200, 451-500, 736-780, 1149-1198, 1206-1212, 1363-1374, 1435-1446, 1498-1506, 1589-1600, 1602, 1641-1644, 1665-1668, 1683-1684, 1709-1712, 1733-1736 or 1748, or fragments or complements thereof. In particular embodiments, the bisulfite-converted minus-strand DNA sequences include any one or more having at least 80%, 85%, 87%, 90%, 91%, 92%, 93%, 94%, 95%, 96%, 97%, 98%, 99% or 100% identity to any of SEQ ID NOs: 1363-1374, 1435-1446, 1498-1506, 1589-1600, 1602, 1641-1644, 1665-1668, 1683-1684, 1709-1712, 1733-1736 or 1748, or fragments or complements thereof. In particular embodiments, the bisulfite-converted minus-strand DNA sequences include any one or more having at least 80%, 85%, 87%, 90%, 91%, 92%, 93%, 94%, 95%, 96%, 97%, 98%, 99% or 100% identity to any of SEQ ID NOs: 1641-1644, 1665-1668, 1683-1684, 1709-1712, 1733-1736 or 1748, or fragments or complements thereof.

[0095] In some embodiments, the informative loci include methylated nucleic acid sequences that have been treated with bisulfite. In some embodiments, the bisulfite-converted methylated minus-strand DNA sequences have at least 80%, 85%, 87%, 90%, 91%, 92%, 93%, 94%, 95%, 96%, 97%, 98%, 99% or 100% identity to any of SEQ ID NOs: 251-300, 551-600, 826-870, 1263-1312, 1320-1326, 1387-1398, 1459-1470, 1516-1524, 1615-1626, 1628, 1649-1652, 1673-1676, 1687-1688, 1717-1720, 1741-1744 or 1750, or any fragments or complements thereof. In particular embodiments, the bisulfite-converted methylated minus-strand DNA sequences have at least 80%, 85%, 87%, 90%, 91%, 92%, 93%, 94%, 95%, 96%, 97%, 98%, 99% or 100% identity to any of SEQ ID NOs: 1387-1398, 1459-1470, 1516-1524, 1615-1626, 1628, 1649-1652, 1673-1676, 1687-1688, 1717-1720, 1741-1744 or 1750, or fragments or complements thereof. In particular embodiments, the bisulfite-converted methylated minus-strand DNA sequences have at least 80%, 85%, 87%, 90%, 91%, 92%, 93%, 94%, 95%, 96%, 97%, 98%, 99% or 100% identity to any of SEQ ID NOs: 1649-1652, 1673-1676, 1687-1688, 1717-1720, 1741-1744 or 1750, or fragments or complements thereof.

[0096] In particular embodiments, the disclosure provides for nucleic acid sequences corresponding to the UnUp35, UnUp190, UnUp62, UnUp100, UnUp106, UnUp146, UnUp177, UnUp207, UnUp229, UnUp254, UnUp280, and/or UnUp307 sequences, as defined herein. In some embodiments, any of the UnUp35, UnUp190, UnUp62, UnUp100, UnUp106, UnUp146, UnUp177, UnUp207, UnUp229, UnUp254, UnUp280, and/or UnUp307 nucleotide sequences disclosed herein are bisulfite converted. In some embodiments, any of the UnUp35, UnUp190, UnUp62, UnUp100, UnUp106, UnUp146, UnUp177, UnUp207, UnUp229, UnUp254, UnUp280, and/or UnUp307 nucleotide sequences disclosed herein are methylated and bisulfite converted. In some embodiments, any of the UnUp35, UnUp190, UnUp62, UnUp100, UnUp106, UnUp146, UnUp177, UnUp207, UnUp229, UnUp254, UnUp280, and/or UnUp307 nucleotide sequences disclosed herein are sequences that have been amplified from a nucleic acid sequence taken from a sample from a subject. In some embodiments, the nucleic acid sequence has been amplified following bisulfite conversion. In some embodiments, the nucleic acid sequence has been amplified following bisulfite conversion and using methylation specific primers.

[0097] In particular embodiments, the disclosure provides for nucleic acid sequences corresponding to the UnUp106, UnUp146, UnUp207 and/or UnUp307, as defined herein. In some embodiments, any of the UnUp106, UnUp146, UnUp207 and/or UnUp307 nucleotide sequences disclosed herein are bisulfite converted. In some embodiments, any of the UnUp106, UnUp146, UnUp207 and/or UnUp307 nucleotide sequences disclosed herein are methylated and bisulfite converted. In some embodiments, any of the UnUp106, UnUp146, UnUp207 and/or UnUp307 nucleotide sequences disclosed herein are sequences that have been amplified from a nucleic acid sequence taken from a sample from a subject. In some embodiments, the nucleic acid sequence has been amplified following bisulfite conversion. In some embodiments, the nucleic acid sequence has been amplified following bisulfite conversion and using methylation specific primers.

[0098] The present disclosure contemplates methods for selecting an individual to undergo a diagnostic procedure to determine the presence of colon neoplasia, colon adenoma, colon cancer, or recurrence of colon cancer within the body, by obtaining a biological sample from an individual, and determining in said sample the presence of DNA methylation of any of the sequences having at least 80%, 85%, 87%, 90%, 91%, 92%, 93%, 94%, 95%, 96%, 97%, 98%, 99% or 100% identity to any of SEQ ID NOs: 1-100, 301-400, 601-690, 985-1098, 1327-1350, 1399-1422, 1471-1488, 1551-1576, 1629-1636, 1653-1660, 1677-1680, 1697-1704, 1721-1728, or 1745-1746, or any fragments or complements thereof. The present disclosure contemplates methods for selecting an individual to undergo a diagnostic procedure to determine the presence of colon neoplasia, colon adenoma, colon cancer, or recurrence of colon cancer within the body, by obtaining a biological sample from an individual, and determining in said sample the presence of DNA methylation of at least one of the sequences of any of the sequences of UnUp62, UnUp100, UnUp106, UnUp146, UnUp177, UnUp207, UnUp229, UnUp254, UnUp280, and/or UnUp307, as defined herein.

[0099] The present disclosure also contemplates methods for selecting an individual to undergo a treatment for colon neoplasia, colon adenoma, colon cancer, or recurrence of colon cancer, by obtaining a biological sample from an individual, and determining in said sample the presence of DNA methylation in at least one of the sequences of any of the sequences having at least 80%, 85%, 87%, 90%, 91%, 92%, 93%, 94%, 95%, 96%, 97%, 98%, 99% or 100% identity to any of SEQ ID NOs: 1-100, 301-400, 601-690, 985-1098, 1327-1350, 1399-1422, 1471-1488, 1551-1576, 1629-1636, 1653-1660, 1677-1680, 1697-1704, 1721-1728, or 1745-1746, or any fragments or complements thereof. The present disclosure also contemplates methods for selecting an individual to undergo a treatment for colon neoplasia, colon adenoma, colon cancer, or recurrence of colon cancer, by obtaining a biological sample from an individual, and determining in said sample the presence of DNA methylation in at least one of the sequences of any of the sequences of UnUp62, UnUp100, UnUp106, UnUp146, UnUp177, UnUp207, UnUp229, UnUp254, UnUp280, and/or UnUp307, as defined herein.

[0100] The present disclosure also contemplates methods for determining the response of an individual with colorectal cancer to therapy by obtaining a biological sample from an individual with colorectal cancer, and determining in said sample the presence of DNA methylation in at least one of the sequences of any of the sequences having at least 80%, 85%, 87%, 90%, 91%, 92%, 93%, 94%, 95%, 96%, 97%, 98%, 99% or 100% identity to any of SEQ ID NOs: 1-100, 301-400, 601-690, 985-1098, 1327-1350, 1399-1422, 1471-1488, 1551-1576, 1629-1636, 1653-1660, 1677-1680, 1697-1704, 1721-1728, or 1745-1746, or any fragments or complements thereof. The present disclosure also contemplates methods for determining the response of an individual with colorectal cancer to therapy by obtaining a biological sample from an individual with colorectal cancer, and determining in said sample the presence of DNA methylation in at least one of the sequences of any of the sequences of UnUp62, UnUp100, UnUp106, UnUp146, UnUp177, UnUp207, UnUp229, UnUp254, UnUp280, and/or UnUp307, as defined herein. In some implementations, an increase in levels of methylation over time is indicative of disease progression and a need for change to a new therapy, whereas an absence of increase in levels of methylation over time or a decrease in levels of methylation over time is indicative that change in therapy is not required.

[0101] The present disclosure contemplates methods for selecting an individual to undergo a diagnostic procedure to determine the presence of colon neoplasia, colon adenoma, colon cancer, or recurrence of colon cancer within the body, by obtaining a biological sample from an individual, and determining in said sample the presence of DNA methylation by bisulfite conversion and assay for C bases of any of the sequences having at least 80%, 85%, 87%, 90%, 91%, 92%, 93%, 94%, 95%, 96%, 97%, 98%, 99% or 100% identity to any of SEQ ID NOs: 101-300, 401-600, 691-870, 1099-1326, 1351-1398, 1423-1470, 1489-1524, 1577-1628, 1637-1652, 1661-1676, 1681-1688, 1705-1720, 1729-1744, or 1747-1750, or any fragments or complements thereof. The present disclosure contemplates methods for selecting an individual to undergo a diagnostic procedure to determine the presence of colon neoplasia, colon adenoma, colon cancer, or recurrence of colon cancer within the body, by obtaining a biological sample from an individual, and determining in said sample the presence of DNA methylation of at least one of the sequences of any of the sequences of UnUp62, UnUp100, UnUp106, UnUp146, UnUp177, UnUp207, UnUp229, UnUp254, UnUp280, and/or UnUp307, as defined herein.

[0102] The present disclosure also contemplates methods for selecting an individual to undergo a treatment for colon neoplasia, colon adenoma, colon cancer, or recurrence of colon cancer, by obtaining a biological sample from an individual, and determining in said sample the presence of DNA methylation by bisulfite conversion and assay for C bases in at least one of the sequences of any of the sequences having at least 80%, 85%, 87%, 90%, 91%, 92%, 93%, 94%, 95%, 96%, 97%, 98%, 99% or 100% identity to any of SEQ ID NOs: 101-300, 401-600, 691-870, 1099-1326, 1351-1398, 1423-1470, 1489-1524, 1577-1628, 1637-1652, 1661-1676, 1681-1688, 1705-1720, 1729-1744, or 1747-1750, or any fragments or complements thereof. The present disclosure also contemplates methods for selecting an individual to undergo a treatment for colon neoplasia, colon adenoma, colon cancer, or recurrence of colon cancer, by obtaining a biological sample from an individual, and determining in said sample the presence of DNA methylation in at least one of the sequences of any of the sequences of UnUp62, UnUp100, UnUp106, UnUp146, UnUp177, UnUp207, UnUp229, UnUp254, UnUp280, and/or UnUp307, as defined herein.

[0103] The present disclosure also contemplates methods for determining the response of an individual with colorectal cancer to therapy by obtaining a biological sample from an individual with colorectal cancer, and determining in said sample the presence of DNA methylation by bisulfite conversion and assay for C bases in at least one of the sequences of any of the sequences having at least 80%, 85%, 870%, 90%, 91%, 92%, 93%, 94%, 95%, 96%, 97%, 98%, 99% or 100% identity to any of SEQ ID NOs: 101-300, 401-600, 691-870, 1099-1326, 1351-1398, 1423-1470, 1489-1524, 1577-1628, 1637-1652, 1661-1676, 1681-1688, 1705-1720, 1729-1744, or 1747-1750, or any fragments or complements thereof. The present disclosure also contemplates methods for determining the response of an individual with colorectal cancer to therapy by obtaining a biological sample from an individual with colorectal cancer, and determining in said sample the presence of DNA methylation in at least one of the sequences of any of the sequences of UnUp62, UnUp100, UnUp106, UnUp146, UnUp177, UnUp207, UnUp229, UnUp254, UnUp280, and/or UnUp307, as defined herein. In some implementations, an increase in levels of methylation over time is indicative of disease progression and a need for change to a new therapy, whereas an absence of increase in levels of methylation over time or a decrease in levels of methylation over time is indicative that change in therapy is not required.

[0104] The present disclosure also provides sequences that will hybridize under highly stringent conditions to any of the informative loci disclosed herein, or fragments or complements thereof. As discussed above, one of ordinary skill in the art will understand readily that appropriate stringency conditions which promote DNA hybridization can be varied. One of ordinary skill in the art will understand readily that appropriate stringency conditions which promote DNA hybridization can be varied. For example, one could perform the hybridization at 6.0× sodium chloride/sodium citrate (SSC) at about 45° C., followed by a wash of 2.0×SSC at 50° C. For example, the salt concentration in the wash step can be selected from a low stringency of about 2.0×SSC at 50° C. to a high stringency of about 0.2×SSC at 50° C. In addition, the temperature in the wash step can be increased from low stringency conditions at room temperature, about 22° C., to high stringency conditions at about 65° C. Both temperature and salt may be varied, or temperature or salt concentration may be held constant while the other variable is changed. In one embodiment, the disclosure provides nucleic acids which hybridize under low stringency conditions of 6×SSC at room temperature followed by a wash at 2×SSC at room temperature.

[0105] In other embodiments, the disclosure also provides the methylated forms of any of the informative loci disclosed herein, or fragments or complements thereof, wherein the cytosine bases of the CpG islands present in said sequences are methylated. In other words, the nucleotide sequences listed of any of the sequences disclosed herein may be either in the methylated status (e.g., as seen in neoplasias) or in the unmethylated status (e.g., as seen in normal cells). In further embodiments, the nucleotide sequences of the disclosure can be isolated, recombinant, and/or fused with a heterologous nucleotide sequence, or in a DNA library.

[0106] In certain embodiments, the present disclosure provides bisulfite-converted nucleotide sequences, for example, bisulfite-converted sequences of any of the sequences disclosed herein. In some embodiments, the bisulfite-converted nucleotide sequences are any of the sequences having at least 80%, 85%, 87%, 90%, 91%, 92%, 93%, 94%, 95%, 96%, 97%, 98%, 99% or 100% identity to any of SEQ ID NOs: 101-300, 401-600, 691-870, 1099-1326, 1351-1398, 1423-1470, 1489-1524, 1577-1628, 1637-1652, 1661-1676, 1681-1688, 1705-1720, 1729-1744, or 1747-1750, or any fragments or reverse complements thereof. In particular embodiments, the bisulfite-converted nucleotide sequences are any of the sequences having at least 80%, 85%, 87%, 90%, 91%, 92%, 93%, 94%, 95%, 96%, 97%, 98%, 99% or 100% identity to any of SEQ ID NOs: 1705-1720, 1578-1579, 1582, 1585-1587, 1590-1591, 1594, 1597-1599, 1604-1605, 1608, 1612-1613, 1616-1617, 1620, and 1624-1625. In some embodiments, the sequence comprises a sequence having at least 80%, 85%, 90%, 91%, 92%, 93%, 94%, 95%, 96%, 97%, 98%, 99% or 100% identity to any of the following sequences SEQ ID NO: 1705-1720. In some embodiments, the sequence comprises a sequence having at least 80% 85%, 90%, 91%, 92%, 93%, 94%, 95%, 96%, 97%, 98%, 99% or 100% identity to 1706, 1710, 1714 or 1718.

[0107] Such bisulfite-converted nucleotide sequences can be used for detecting the methylation status, for example, by an MSP reaction or by direct sequencing. In some embodiments, the bisulfite-converted nucleotide sequences are sequenced by means of next-generation sequencing. These bisulfite-converted sequences are also of use for designing primers for MSP reactions that specifically detect methylated or unmethylated nucleotide sequences following bisulfite conversion. In yet other embodiments, the bisulfite-converted nucleotide sequences of the disclosure also include nucleotide sequences that will hybridize under highly stringent conditions to any of the nucleotide sequences having at least 80%, 85%, 87%, 90%, 91%, 92%, 93%, 94%, 95%, 96%, 97%, 98%, 99% or 100% identity to any of SEQ ID NOs: 1-1760.

[0108] In further aspects, the application provides methods for producing such bisulfite-converted nucleotide sequences, for example, the application provides methods for treating a nucleotide sequence with a bisulfite agent such that the unmethylated cytosine bases are converted to a different nucleotide base such as a uracil.

[0109] In yet other aspects, the application provides oligonucleotide primers for amplifying a region within the nucleic acid sequence of any of the nucleotide sequences having at least 80%, 85%, 87%, 90%, 91%, 92%, 93%, 94%, 95%, 96%, 97%, 98%, 99% or 100% identity to any of SEQ ID NOs: 1-1760. In certain aspects, a pair of the oligonucleotide primers can be used in a detection assay, such as the HpaII assay. In certain aspects, primers used in an MSP reaction can specifically distinguish between methylated and non-methylated DNA.

[0110] The primers of the disclosure have sufficient length and appropriate sequence so as to provide specific initiation of amplification nucleic acids. Primers of the disclosure are designed to be “substantially” complementary to each strand of the nucleic acid sequence to be amplified. While exemplary primers are provided as SEQ ID NOs: 871-984, 1525-1550, 1689-1696 or 1751-1762, it is understood that any primer(s) that hybridizes with any of the bisulfite-converted sequences disclosed herein are included within the scope of this disclosure and is useful in the method of the disclosure for detecting methylated nucleic acid, as described. Similarly, it is understood that any primer(s) that would serve to amplify a methylation-sensitive restriction site or sites within the differentially methylated region of any of the informative loci disclosed herein, or fragments or complements thereof, are included within the scope of this disclosure and is useful in the method of the disclosure for detecting nucleic methylated nucleic acid, as described.

[0111] The oligonucleotide primers of the disclosure may be prepared by using any suitable method, such as conventional phosphotriester and phosphodiester methods or automated embodiments thereof. In one such automated embodiment, diethylphosphoramidites are used as starting materials and may be synthesized as described by Beaucage, et al. (Tetrahedron Letters, 22:1859-1862, 1981). One method of synthesizing oligonucleotides on a modified solid support is described in U.S. Pat. No. 4,458,066.

[0112] In some embodiments, the disclosure provides for primers for amplifying any of the informative loci sequences, or fragments or complements thereof, disclosed herein. In some embodiments, the disclosure provides for primers having at least 1, 2, 3, 4, 5, 6, 7, 8, 9, 10, 11, 12, 13, 14, 15, 16, 17, 18, 19, 20, 21, 22, 23, 24, 25, 26, 27, 28, 29, 30, 31, 32, 33, 34, or 35 consecutive nucleotides of any one or more of the sequences having at least 80%, 85%, 90%, 91%, 92%, 93%, 94%, 95%, 96%, 97%, 98%, 99%, or 100% identity to any of SEQ ID NOs: 871-984, 1525-1550, 1689-1696 or 1751-1762. In some embodiments, the primers comprise a sequence having at least 80%, 85%, 90%, 91%, 92%, 93%, 94%, 95%, 96%, 97%, 98%, 99%, or 100% identity to any of SEQ ID NOs: 871-984, 1525-1550, 1689-1696 or 1751-1762, or fragments or reverse complements thereof. In particular embodiments, the disclosure provides for primers having at least 1, 2, 3, 4, 5, 6, 7, 8, 9, 10, 11, 12, 13, 14, 15, 16, 17, 18, 19, 20, 21, 22, 23, 24, 25, 26, 27, 28, 29, 30, 31, 32, 33, 34, or 35 consecutive nucleotides of any one or more of the sequences having at least 80%, 85%, 90%, 91%, 92%, 93%, 94%, 95%, 96%, 97%, 98%, 99%, or 100% identity to any of SEQ ID NOs: 1525-1550, 1689-1696 or 1751-1762. In some embodiments, the primers comprise a sequence having at least 80%, 85%, 90%, 91%, 92%, 93%, 94%, 95%, 96%, 97%, 98%, 99%, or 100% identity to any of SEQ ID NOs: 1525-1550, 1689-1696 or 1751-1762. In particular embodiments, the disclosure provides for primers having at least 1, 2, 3, 4, 5, 6, 7, 8, 9, 10, 11, 12, 13, 14, 15, 16, 17, 18, 19, 20, 21, 22, 23, 24, 25, 26, 27, 28, 29, 30, 31, 32, 33, 34, or 35 consecutive nucleotides of any one or more of the sequences having at least 80%, 85%, 90%, 91%, 92%, 93%, 94%, 95%, 96%, 97%, 98%, 99%, or 100% identity to any of SEQ ID NOs: 1689-1696 or 1751-1762. In some embodiments, the primers comprise a sequence having at least 80%, 85%, 90%, 91%, 92%, 93%, 94%, 95%, 96%, 97%, 98%, 99%, or 100% identity to any of SEQ ID NOs: 1689-1696 or 1751-1762.

[0113] In some embodiments, the disclosure provides for nucleotide sequences amplified using any of the primer sequences disclosed herein. In some embodiments, the disclosure provides for amplicons that were generated using any one or more primer having at least 1, 2, 3, 4, 5, 6, 7, 8, 9, 10, 11, 12, 13, 14, 15, 16, 17, 18, 19, 20, 21, 22, 23, 24, 25, 26, 27, 28, 29, 30, 31, 32, 33, 34, or 35 consecutive nucleotides of any one or more of the sequences having at least 80%, 85%, 90%, 91%, 92%, 93%, 94%, 95%, 96%, 97%, 98%, 99%, or 100% identity to any of SEQ ID NOs: 871-984, 1525-1550, 1689-1696, or 1751-1762. In some embodiments, the amplicons comprise a nucleotide sequence that is at least 80%, 85%, 90%, 91%, 92%, 93%, 94%, 95%, 96%, 97%, 98%, 99%, or 100% identical to any of the sequences of SEQ ID NOs: 1099-1326, 1551-1628, or 1697-1720, or any fragments or complements thereof. In some embodiments, the amplicons comprise a nucleotide sequence that is at least 80%, 85%, 90%, 91%, 92%, 93%, 94%, 95%, 96%, 97%, 98%, 99%, or 100% identical to any of the sequences of SEQ ID NOs: 1099-1236, 1577-1628, or 1705-1720, or any fragments or complements thereof. In particular embodiments, the amplicons comprise a nucleotide sequence that is at least 80%, 85%, 90%, 91%, 92%, 93%, 94%, 95%, 96%, 97%, 98%, 99%, or 100% identical to any of the sequences of SEQ ID NOs: 1697-1720, or any fragments or complements thereof. In particular embodiments, the amplicons comprise a nucleotide sequence that is at least 80%, 85%, 90%, 91%, 92%, 93%, 94%, 95%, 96%, 97%, 98%, 99%, or 100% identical to any of the sequences of SEQ ID NOs: 1705-1720, or any fragments or complements thereof.

[0114] A fragment of any of the nucleotide sequences disclosed herein may be of any length, so long as the methylation status of at least a portion of that nucleotide sequence may be determined. In some embodiments, the nucleotide sequence is at least 10, 15, 25, 30, 40, 50, 60, 70, 80, 90, 100, 110, 120, 130, 140, 150, 160, 170, 180, 190, 200, 250, 300, 350, 400, 450, 500, 600, 700, 800, 900, 1000, 1200, 1400, 1500, 1700, or 2000 nucleotides in length. In some embodiments, the nucleotide sequence is at least 10-2000, 10-1000, 10-500, 10-200, 10-150, 10-100, 10-50, 10-30, 10-25, 10-20, 50-2000, 50-1000, 50-500, 50-200, 50-150, 50-100, 80-2000, 80-1000, 80-500, 80-150, 80-100, 100-2000, 100-1000, 100-500, 100-200, or 100-150 nucleotides in length.

### IV. Assays and Drug Screening Methodologies

[0115] In certain aspects, the application provides assays and methods using any of the informative loci disclosed herein, or fragments or complements thereof, as molecular markers that distinguish between healthy cells and cancer cells. For example, in one embodiment, the application provides methods and assays using any of the informative loci disclosed herein, or fragments or complements thereof, as markers that distinguish between healthy cells and neoplasia cells. In other embodiments, the application provides methods and assays using any of the informative loci disclosed herein, or fragments or complements thereof, as markers that distinguish between healthy cells and cells derived from neoplasias of the lower gastrointestinal tract. In one aspect, a molecular marker of the invention is a differentially methylated sequence of an informative locus.

[0116] In certain embodiments, the application provides assays for detecting differentially methylated nucleotide sequences. Thus, a differentially methylated nucleotide sequence, in its methylated state, can serve as a target for detection using various methods described herein and the methods that are well within the purview of the skilled artisan in view of the teachings of this application.

[0117] In certain embodiments, the disclosure provides for a method of assessing the methylation status of any individual nucleotide sequence disclosed herein. In some embodiments, the disclosure provides for a method of assessing the methylation of a panel of nucleotide sequences disclosed herein. In some embodiments, the panel comprises any one or more of the following combinations of sequences: 1) UnUp62 and UnUp229; 2) UnUp62, UnUp100, UnUp106, UnUp177, UnUp207, UnUp229 and UnUp307; 3) UnUp106 and UnUp146; 4) UnUp280 and UnUp307; 5) UnUp254 and UnUp307; 6) UnUp146 and UnUp254; 7) UnUp177 and UnUp307; 8) UnUp146 and UnUp307; 9) UnUp106 and UnUp307; 10) UnUp106, UnUp177 and UnUp307; 11) UnUp106, UnUp254, and UnUp307; 12) UnUp106, UnUp280 and UnUp307; 13) UnUp177, UnUp254 and UnUp307; 14) UnUp177, UnUp280 and UnUp307; 15) UnUp106, UnUp146, UnUp280 and UnUp307; 16) UnUp106, UnUp146, UnUp254 and UnUp307; 17) UnUp146, UnUp177, UnUp254 and UnUp307; or 18) UnUp106, UnUp207 and UnUp307. In particular embodiments, the panel comprises the following combination of sequences: UnUp106, UnUp146, UnUp207 and UnUp307.

[0118] In some embodiments, any of the informative loci disclosed herein is assessed in combination with an assessment of vimentin gene expression and/or methylation. In some embodiments, the disclosure provides for an assessment of the methylation status of any of the informative loci disclosed herein (or any combination of the informative loci disclosed herein) in combination with the methylation status of any of the vimentin nucleic acid sequences disclosed herein. In some embodiments, vimentin methylation is assessed in combination with assessing methylation of any of the following sequences or combinations of the following sequences: UnUp106, UnUp35, UnUp146, UnUp190, UnUp207, UnUp307, UnUp62, UnUp229, UnUp100, UnUp177, UnUp280 or UnUp254. In some embodiments, vimentin methylation is assessed in combination with assessing methylation of any of the following sequences or combinations of the following sequences: UnUp106, UnUp146, UnUp207 and UnUp307. In some embodiments, vimentin methylation is assessed in combination with assessing methylation of UnUp146.

[0119] In certain aspects, such methods for detecting methylated nucleotide sequences are based on treatment of genomic DNA with a chemical compound which converts non-methylated C, but not methylated C (i.e., 5 mC), to a different nucleotide base. One such compound is sodium bisulfite, which converts C, but not 5 mC, to U. Methods for bisulfite treatment of DNA are known in the art (Herman, et al., 1996, Proc Natl Acad Sci USA, 93:9821-6; Herman and Baylin, 1998, Current Protocols in Human Genetics, N. E. A. Dracopoli, ed., John Wiley & Sons, 2:10.6.1-10.6.10; U.S. Pat. No. 5,786,146). To illustrate, when a DNA molecule that contains unmethylated C nucleotides is treated with sodium bisulfite to become a compound-converted DNA, the sequence of that DNA is changed (C→U). Detection of the U in the converted nucleotide sequence is indicative of an unmethylated C.

[0120] The different nucleotide base (e.g., U) present in compound-converted nucleotide sequences can subsequently be detected in a variety of ways. In a preferred embodiment, the present invention provides a method of detecting U in compound-converted DNA sequences by using “methylation sensitive PCR” (MSP) (see, e.g., Herman. et al., 1996, Proc. Natl. Acad. Sci. USA, 93:9821-9826; U.S. Pat. No. 6,265,171; U.S. Pat. No. 6,017,704, U.S. Pat. No. 6,200,756). In MSP, one set of primers (i.e., comprising a forward and a reverse primer) amplifies the compound-converted template sequence if C bases in CpG dinucleotides within the DNA are methylated. This set of primers is called “methylation-specific primers.” Another set of primers amplifies the compound-converted template sequence if C bases in CpG dinucleotides within the 5′ flanking sequence are not methylated. This set of primers is called “unmethylation-specific primers.”

[0121] In MSP, the reactions use the compound-converted DNA from a sample in a subject. In assays for methylated DNA, methylation-specific primers are used. In the case where C within CpG dinucleotides of the target sequence of the DNA are methylated, the methylation-specific primers will amplify the compound-converted template sequence in the presence of a polymerase and an MSP product will be produced. If C within CpG dinucleotides of the target sequence of the DNA is not methylated, the methylation-specific primers will not amplify the compound-converted template sequence in the presence of a polymerase and an MSP product will not be produced.

[0122] It is often also useful to run a control reaction for the detection of unmethylated DNA. The reactions uses the compound-converted DNA from a sample in a subject and unmethylation-specific primers are used. In the case where C within CpG dinucleotides of the target sequence of the DNA are unmethylated, the unmethylation specific primers will amplify the compound-converted template sequence in the presence of a polymerase and an MSP product will be produced. If C within CpG dinucleotides of the target sequence of the DNA is methylated, the unmethylation-specific primers will not amplify the compound-converted template sequence in the presence of a polymerase and an MSP product will not be produced. Note that a biologic sample will often contain a mixture of both neoplastic cells that give rise to a signal with methylation specific primers, and normal cellular elements that give rise to a signal with unmethylation-specific primers. The unmethylation specific signal is often of use as a control reaction, but does not in this instance imply the absence of neoplasia as indicated by the positive signal derived from reactions using the methylation specific primers.

[0123] Primers for a MSP reaction are derived from the compound-converted template sequence. Herein, “derived from” means that the sequences of the primers are chosen such that the primers amplify the compound-converted template sequence in a MSP reaction. Each primer comprises a single-stranded DNA fragment which is at least 8 nucleotides in length. Preferably, the primers are less than 50 nucleotides in length, more preferably from 15 to 35 nucleotides in length. Because the compound-converted template sequence can be either the Watson strand or the Crick strand of the double-stranded DNA that is treated with sodium bisulfite, the sequences of the primers is dependent upon whether the Watson or Crick compound-converted template sequence is chosen to be amplified in the MSP. Either the Watson or Crick strand can be chosen to be amplified.

[0124] The compound-converted template sequence, and therefore the product of the MSP reaction, can, in some embodiments, be between 20 to 3000 nucleotides in length, between 50 to 500 nucleotides in length, or between 80 to 150 nucleotides in length. Preferably, the methylation-specific primers result in an MSP product of a different length than the MSP product produced by the unmethylation-specific primers.

[0125] A variety of methods can be used to determine if an MSP product has been produced in a reaction assay. One way to determine if an MSP product has been produced in the reaction is to analyze a portion of the reaction by agarose gel electrophoresis. For example, a horizontal agarose gel of from 0.6 to 2.0% agarose is made and a portion of the MSP reaction mixture is electrophoresed through the agarose gel. After electrophoresis, the agarose gel is stained with ethidium bromide. MSP products are visible when the gel is viewed during illumination with ultraviolet light. By comparison to standardized size markers, it is determined if the MSP product is of the correct expected size.

[0126] Other methods can be used to determine whether a product is made in an MSP reaction. One such method is called “real-time PCR.” Real-time PCR utilizes a thermal cycler (i.e., an instrument that provides the temperature changes necessary for the PCR reaction to occur) that incorporates a fluorimeter (i.e., an instrument that measures fluorescence). The real-time PCR reaction mixture also contains a reagent whose incorporation into a product can be quantified and whose quantification is indicative of copy number of that sequence in the template. One such reagent is a fluorescent dye, called SYBR Green I (Molecular Probes, Inc.; Eugene, Oreg.) that preferentially binds double-stranded DNA and whose fluorescence is greatly enhanced by binding of double-stranded DNA. When a PCR reaction is performed in the presence of SYBR Green I, resulting DNA products bind SYBR Green I and fluorescence. The fluorescence is detected and quantified by the fluorimeter. Such technique is particularly useful for quantification of the amount of the product in the PCR reaction. Additionally, the product from the PCR reaction may be quantitated in “real-time PCR” by the use of a variety of probes that hybridize to the product including TaqMan probes and molecular beacons. Quantitation may be on an absolute basis, or may be relative to a constitutively methylated DNA standard, or may be relative to an unmethylated DNA standard. In one instance the ratio of methylated derived product to unmethylated derived product may be constructed.

[0127] Methods for detecting methylation of the DNA according to the present disclosure are not limited to MSP, and may cover any assay for detecting DNA methylation. Another example method of detecting methylation of the DNA is by using “methylation-sensitive” restriction endonucleases. Such methods comprise treating the genomic DNA isolated from a subject with a methylation-sensitive restriction endonuclease and then using the restriction endonuclease-treated DNA as a template in a PCR reaction. Herein, methylation-sensitive restriction endonucleases recognize and cleave a specific sequence within the DNA if C bases within the recognition sequence are not methylated. If C bases within the recognition sequence of the restriction endonuclease are methylated, the DNA will not be cleaved. Examples of such methylation-sensitive restriction endonucleases include, but are not limited to HpaII, SmaI, SacII, EagI, BstUI, and BssHII. In this technique, a recognition sequence for a methylation-sensitive restriction endonuclease is located within the template DNA, at a position between the forward and reverse primers used for the PCR reaction. In the case that a C base within the methylation-sensitive restriction endonuclease recognition sequence is not methylated, the endonuclease will cleave the DNA template and a PCR product will not be formed when the DNA is used as a template in the PCR reaction. In the case that a C base within the methylation-sensitive restriction endonuclease recognition sequence is methylated, the endonuclease will not cleave the DNA template and a PCR product will be formed when the DNA is used as a template in the PCR reaction. Therefore, methylation of C bases can be determined by the absence or presence of a PCR product (Kane, et al., 1997, Cancer Res, 57: 808-11). No sodium bisulfite is used in this technique.

[0128] Yet another exemplary method of detecting methylation of the DNA is called the modified MSP, which method utilizes primers that are designed and chosen such that products of the MSP reaction are susceptible to digestion by restriction endonucleases, depending upon whether the compound-converted template sequence contains CpG dinucleotides or UpG dinucleotides.

[0129] Yet other methods for detecting methylation of the DNA include the MS-SnuPE methods. This method uses compound-converted DNA as a template in a primer extension reaction wherein the primers used produce a product, dependent upon whether the compound-converted template contains CpG dinucleotides or UpG dinucleotides (see e.g., Gonzalgo, et al., 1997, Nucleic Acids Res., 25:2529-31).

[0130] Another exemplary method of detecting methylation of the DNA is called COBRA (i.e., combined bisulfite restriction analysis). This method has been routinely used for DNA methylation detection and is well known in the art (see, e.g., Xiong, et al., 1997, Nucleic Acids Res, 25:2532-4). In this technique, methylation-sensitive restriction endonucleases recognize and cleave a specific sequence within the DNA if C bases within the recognition sequence are methylated. If C bases within the recognition sequence of the restriction endonuclease are not methylated, the DNA will not be cleaved.

[0131] Another exemplary method of detecting methylation of DNA requires hybridization of a compound converted DNA to arrays that include probes that hybridize to sequences derived from a methylated template.

[0132] Another exemplary method of detecting methylation of DNA includes precipitation of methylated DNA with antibodies that bind methylated DNA or with other proteins that bind methylated DNA, and then detection of DNA sequences in the precipitate. The detection of DNA could be done by PCR based methods, by hybridization to arrays, or by other methods known to those skilled in the art.

[0133] In certain embodiments, the disclosure provides methods that involve directly sequencing the product resulting from an MSP reaction to determine if the compound-converted template sequence contains CpG dinucleotides or UpG dinucleotides. Molecular biology techniques such as directly sequencing a PCR product are well known in the art. In some embodiments, the PCR products are sequenced by means of next generation sequencing.

[0134] In some embodiments, methylation of DNA may be measured as a percentage of total DNA. High levels of methylation may be 10-100% methylation, for example, 10%, 20%, 30%, 40%, 50%, 60%, 70%, 80%, 90%, or 100% methylation. Low levels of methylation may be 0%-9.99% methylation, for example, 0%, 0.1%, 0.5%, 1%, 2%, 3%, 4%, 5%, 6%, 7%, 8%, 9%, or 9.99%. At least some normal tissues, for example, normal colon samples, may not have any detectable methylation.

[0135] The skilled artisan will appreciate that the present disclosure is based in part, on the recognition that any one of the informative loci disclosed herein, or any of the fragments or complements thereof, may include nucleotide sequences that encode polypeptides that, for example, may function as a tumor suppressor gene. Accordingly, the application further provides methods for detecting such polypeptides in cell samples. In some embodiments, the disclosure provides detection methods by assaying such polypeptides so as to determine whether a patient has or does not have a disease condition. Further, such a disease condition may be characterized by decreased levels of such polypeptides. In certain embodiments, the disclosure provides methods for determining whether a patient is or is not likely to have cancer by detecting such polypeptides. In further embodiments, the disclosure provides methods for determining whether the patient is having a relapse or determining whether a patient's cancer is responding to treatment.

[0136] Optionally, such methods involve obtaining a quantitative measure of the protein in the sample. In view of this specification, one of skill in the art will recognize a wide range of techniques that may be employed to detect and optionally quantitate the presence of a protein. In some embodiments, a protein is detected with an antibody. In many embodiments, an antibody-based detection assay involves bringing the sample and the antibody into contact so that the antibody has an opportunity to bind to proteins having the corresponding epitope. In many embodiments, an antibody-based detection assay also typically involves a system for detecting the presence of antibody-epitope complexes, thereby achieving a detection of the presence of the proteins having the corresponding epitope. Antibodies may be used in a variety of detection techniques, including enzyme-linked immunosorbant assays (ELISAs), immunoprecipitations, Western blots. Antibody-independent techniques for identifying a protein may also be employed. For example, mass spectroscopy, particularly coupled with liquid chromatography, permits detection and quantification of large numbers of proteins in a sample. Two-dimensional gel electrophoresis may also be used to identify proteins, and may be coupled with mass spectroscopy or other detection techniques, such as N-terminal protein sequencing. RNA aptamers with specific binding for the protein of interest may also be generated and used as a detection reagent. Samples should generally be prepared in a manner that is consistent with the detection system to be employed. For example, a sample to be used in a protein detection system should generally be prepared in the absence of proteases. Likewise, a sample to be used in a nucleic acid detection system should generally be prepared in the absence of nucleases. In many instances, a sample for use in an antibody-based detection system will not be subjected to substantial preparatory steps. For example, urine may be used directly, as may saliva and blood, although blood will, in certain preferred embodiments, be separated into fractions such as plasma and serum.

[0137] In certain embodiments, a method of the disclosure comprises detecting the presence of an informative loci-expressed nucleic acid, such as an mRNA, in a sample. Optionally, the method involves obtaining a quantitative measure of the informative loci-expressed nucleic acid in the sample. In view of this specification, one of skill in the art will recognize a wide range of techniques that may be employed to detect and optionally quantitate the presence of a nucleic acid. Nucleic acid detection systems generally involve preparing a purified nucleic acid fraction of a sample, and subjecting the sample to a direct detection assay or an amplification process followed by a detection assay. Amplification may be achieved, for example, by polymerase chain reaction (PCR), reverse transcriptase (RT) and coupled RT-PCR. Detection of a nucleic acid is generally accomplished by probing the purified nucleic acid fraction with a probe that hybridizes to the nucleic acid of interest, and in many instances, detection involves an amplification as well. Northern blots, dot blots, microarrays, quantitative PCR, and quantitative RT-PCR are all well known methods for detecting a nucleic acid in a sample.

[0138] In certain embodiments, the disclosure provides nucleic acid probes that bind specifically to an informative loci nucleic acid. Such probes may be labeled with, for example, a fluorescent moiety, a radionuclide, an enzyme or an affinity tag such as a biotin moiety. For example, the TaqMan® system employs nucleic acid probes that are labeled in such a way that the fluorescent signal is quenched when the probe is free in solution and bright when the probe is incorporated into a larger nucleic acid.

[0139] Immunoscintigraphy using monoclonal antibodies directed at the informative loci may be used to detect and/or diagnose a cancer. For example, monoclonal antibodies against the informative loci labeled with ⁹⁹Technetium, ¹¹¹Indium, ¹²⁵Iodine—may be effectively used for such imaging. As will be evident to the skilled artisan, the amount of radioisotope to be administered is dependent upon the radioisotope. Those having ordinary skill in the art can readily formulate the amount of the imaging agent to be administered based upon the specific activity and energy of a given radionuclide used as the active moiety. Typically 0.1-100 millicuries per dose of imaging agent, preferably 1-10 millicuries, most often 2-5 millicuries are administered. Thus, compositions according to the present invention useful as imaging agents comprising a targeting moiety conjugated to a radioactive moiety comprise 0.1-100 millicuries, in some embodiments preferably 1-10 millicuries, in some embodiments preferably 2-5 millicuries, in some embodiments more preferably 1-5 millicuries.

[0140] In some embodiments, the disclosure provides for a device useful for detecting the methylation status of any of the nucleotide sequences, or fragments or complements thereof, disclosed herein. In some embodiments, the disclosure provides for a kit comprising components useful for detecting the methylation status of the nucleotide sequences, or fragments, or complements thereof, disclosed herein.

[0141] In certain embodiments, the present disclosure provides drug screening assays for identifying test compounds which potentiate the tumor suppressor function of polypeptides encoded by sequences located in the informative loci disclosed herein, or any of the fragments or complements thereof. In one aspect, the assays detect test compounds which potentiate the expression level of polypeptides encoded by sequences located in the informative loci disclosed herein, or any of the fragments or complements thereof. In another aspect, the assays detect test compounds which inhibit the methylation of DNA. In certain embodiments, drug screening assays can be generated which detect test compounds on the basis of their ability to interfere with stability or function of polypeptides encoded by sequences located in the informative loci disclosed herein, or any of the fragments or complements thereof.

[0142] A variety of assay formats may be used and, in light of the present disclosure, those not expressly described herein will nevertheless be considered to be within the purview of ordinary skill in the art. Assay formats can approximate such conditions as protein expression level, methylation status of nucleotide sequences, tumor suppressing activity, and may be generated in many different forms. In many embodiments, the disclosure provides assays including both cell-free systems and cell-based assays which utilize intact cells.

[0143] Compounds to be tested can be produced, for example, by bacteria, yeast or other organisms (e.g., natural products), produced chemically (e.g., small molecules, including peptidomimetics), or produced recombinantly. The efficacy of the compound can be assessed by generating dose response curves from data obtained using various concentrations of the test compound. Moreover, a control assay can also be performed to provide a baseline for comparison. In the control assay, the formation of complexes is quantitated in the absence of the test compound.

[0144] In many drug screening programs which test libraries of compounds and natural extracts, high throughput assays are desirable in order to maximize the number of compounds surveyed in a given period of time. Assays of the present invention which are performed in cell-free systems, such as may be developed with purified or semi-purified proteins or with lysates, are often preferred as “primary” screens in that they can be generated to permit rapid development and relatively easy detection of an alteration in a molecular target which is mediated by a test compound. Moreover, the effects of cellular toxicity and/or bioavailability of the test compound can be generally ignored in the in vitro system, the assay instead being focused primarily on the effect of the drug on the molecular target as may be manifest in an alteration of binding affinity with other proteins or changes in enzymatic properties of the molecular target.

[0145] In certain embodiments, test compounds identified from these assays may be used in a therapeutic method of treating cancer.

[0146] Still another aspect of the application provides transgenic non-human animals which express a gene located within any one of the informative loci disclosed herein, or any of the fragments or complements thereof, or which have had one or more of such genomic gene(s) disrupted in at least one of the tissue or cell-types of the animal.

[0147] In another aspect, the application provides an animal model for cancer, which has a mis-expressed allele of a gene located within any one of the informative loci disclosed herein, or any of the fragments or complements thereof. Such a mouse model can then be used to study disorders arising from mis-expression of genes located within any one of the informative loci listed in disclosed herein, or any of the fragments or complements thereof.

[0148] Genetic techniques which allow for the expression of transgenes can be regulated via site-specific genetic manipulation in vivo are known to those skilled in the art. For instance, genetic systems are available which allow for the regulated expression of a recombinase that catalyzes the genetic recombination a target sequence. As used herein, the phrase “target sequence” refers to a nucleotide sequence that is genetically recombined by a recombinase. The target sequence is flanked by recombinase recognition sequences and is generally either excised or inverted in cells expressing recombinase activity. Recombinase catalyzed recombination events can be designed such that recombination of the target sequence results in either the activation or repression of expression of the polypeptides. For example, excision of a target sequence which interferes with the expression of a recombinant gene can be designed to activate expression of that gene. This interference with expression of the protein can result from a variety of mechanisms, such as spatial separation of the gene from the promoter element or an internal stop codon. Moreover, the transgene can be made wherein the coding sequence of the gene is flanked recombinase recognition sequences and is initially transfected into cells in a 3′ to 5′ orientation with respect to the promoter element. In such an instance, inversion of the target sequence will reorient the subject gene by placing the 5′ end of the coding sequence in an orientation with respect to the promoter element which allow for promoter driven transcriptional activation.

[0149] In an illustrative embodiment, either the cre/loxP recombinase system of bacteriophage P1 (Lakso et al., (1992) Proc. Natl. Acad. Sci. USA 89:6232-6236; Orban et al., (1992) Proc. Natl. Acad. Sci. USA 89:6861-6865) or the FLP recombinase system of Saccharomyces cerevisiae (O'Gorman et al., (1991) Science 251:1351-1355; PCT publication WO 92/15694) can be used to generate in vivo site-specific genetic recombination systems. Cre recombinase catalyzes the site-specific recombination of an intervening target sequence located between loxP sequences. loxP sequences are 34 base pair nucleotide repeat sequences to which the Cre recombinase binds and are required for Cre recombinase mediated genetic recombination. The orientation of loxP sequences determines whether the intervening target sequence is excised or inverted when Cre recombinase is present (Abremski et al., (1984) J. Biol. Chem. 259:1509-1514); catalyzing the excision of the target sequence when the loxP sequences are oriented as direct repeats and catalyzes inversion of the target sequence when loxP sequences are oriented as inverted repeats.

### V. Subjects and Samples

[0150] In certain aspects, the invention relates to a subject suspected of having or has a cancer such as a neoplasia of the lower gastrointestinal tract (e.g., colorectal cancer). Alternatively, a subject may be undergoing routine screening and may not necessarily be suspected of having such a neoplasia (e.g., cancer). In a preferred embodiment, the subject is a human subject, and the neoplasia is colon neoplasia. In some embodiments, the colon neoplasia is colon cancer. In some embodiments, the cancer is Stage I, Stage II, Stage III, or Stage IV colon cancer. In some embodiments, the cancer is Stage I, Stage II, Stage III, or Stage IV rectal cancer.

[0151] Assaying for biomarkers discussed above in a sample from subjects not known to have, e.g., a neoplasia of the lower gastrointestinal tract can aid in diagnosis of such a neoplasia in the subject. To illustrate, detecting the methylation status of the nucleotide sequences by MSP can be used by itself, or in combination with other various assays, to improve the sensitivity and/or specificity for detecting, e.g., a neoplasia of the lower gastrointestinal tract. Preferably, such detection is made at an early stage in the development of cancer, so that treatment is more likely to be effective.

[0152] In some embodiments, an informative loci in a subject is considered “methylated” for the purposes of determining whether or not the subject is prone to developing and/or has developed a colon neoplasia if the loci is at least 10%, 20%, 30%, 40%, 50%, 60%, 70%, 80%, 90%, or 100% methylated. In some embodiments, a DNA sample from a subject is treated with bisulfite, and the resulting bisulfite sequence corresponds to any of the nucleotide sequences disclosed herein comprising a “Y” nucleotide. In some embodiments, if at least 1, 2, 3, 4, 5, 6, 7, 8, 9, 10, 11, 12, 13, 14, 15, 16, 17, 18, 19, 20, 21, 22, 23, 24, 25, 26, 27, 28, 29, or 30 of the Y residues of the bisulfite-converted sequence have a C, the sequence is considered “methylated” for the purposes of determining whether or not the subject is prone to developing and/or has developed a colon neoplasia. In some embodiments, a DNA sample from a subject is treated with bisulfite, and the resulting bisulfite sequence corresponds to any of the nucleotide sequences disclosed herein comprising a “Y” nucleotide. In some embodiments, if at least 10%, 20%, 30%, 40%, 50%, 60%, 70%, 80%, 90%, or 100% of the Y residues of the bisulfite-converted sequence have a C, the sequence is considered “methylated” for the purposes of determining whether or not the subject is prone to developing and/or has developed a colon neoplasia. In some embodiments, a subject is determined to be prone to developing and/or has developed a colon neoplasia if a certain number of “Y” nucleotides in a bisulfite converted sequence are cytosines. In some embodiments, the certain number is at least 1, 2, 3, 4, 5, 6, 7, 8, 9, 10, 11, 12, 13, 14, 15, 16, 17, 18, 19, 20, 21, 22, 23, 24, 25, 26, 27, 28, 29, or 30 of the Y residues of the bisulfite-converted sequence. In some embodiments, the certain number is least 10%, 20%, 30%, 40%, 50%, 60%, 70%, 80%, 90%, or 100% of the Y residues of the bisulfite-converted sequence. In certain embodiments, a subject is determined to be prone to developing and/or has developed a colon neoplasia if a certain percentage of DNA molecules from a sample from a subject are determined to be “methylated,” as defined herein. In some embodiments, the certain percentage of DNA molecules is at least 10%, 20%, 30%, 40%, 50%, 60%, 70%, 80%, 90%, or 100% of the DNA molecules from the sample are determined to be “methylated.” In some embodiments, the percentage of methylated DNA molecules is determined using next-generation sequencing. Exemplary cut-offs of DNA methylation and DNA molecule percentages may be found in the Examples section provided herein.

[0153] In addition to diagnosis, assaying of a marker in a sample from a subject not known to have, e.g., a neoplasia of the lower gastrointestinal tract, can be prognostic for the subject (i.e., indicating the probable course of the disease). To illustrate, subjects having a predisposition to develop a neoplasia of the lower gastrointestinal tract may possess methylated nucleotide sequences. Assaying of methylated informative loci in a sample from subjects can also be used to select a particular therapy or therapies which are particularly effective against, e.g., a neoplasia of the lower gastrointestinal tract in the subject, or to exclude therapies that are not likely to be effective.

[0154] Assaying of methylated informative loci in samples from subjects that are known to have, or to have had, a cancer is also useful. For example, the present methods can be used to identify whether therapy is effective or not for certain subjects. One or more samples are taken from the same subject prior to and following therapy, and assayed for the informative loci markers. A finding that an informative locus is methylated in the sample taken prior to therapy and absent (or at a lower level) after therapy may indicate that the therapy is effective and need not be altered. In those cases where the informative locus is methylated in the sample taken before therapy and in the sample taken after therapy, it may be desirable to alter the therapy to increase the likelihood that the cancer will be reduced in the subject. Thus, the present method may obviate the need to perform more invasive procedures which are used to determine a patient's response to therapy.

[0155] Cancers frequently recur following therapy in patients with advanced cancers. In this and other instances, the assays of the invention are useful for monitoring over time the status of a cancer associated with silencing of genes located in any of the informative loci disclosed herein, or fragments or complements thereof. For subjects in whom a cancer is progressing, there can be no DNA methylation in some or all samples when the first sample is taken and then appear in one or more samples when the second sample is taken. For subjects in which cancer is regressing, DNA methylation may be present in one or a number of samples when the first sample is taken and then be absent in some or all of these samples when the second sample is taken.

[0156] Samples for use with the methods described herein may be essentially any biological material of interest. For example, a sample may be a bodily fluid sample from a subject, a tissue sample from a subject, a solid or semi-solid sample from a subject, a primary cell culture or tissue culture of materials derived from a subject, cells from a cell line, or medium or other extracellular material from a cell or tissue culture, or a xenograft (meaning a sample of a cancer from a first subject, e.g., a human, that has been cultured in a second subject, e.g., an immuno-compromised mouse). The term “sample” as used herein is intended to encompass both a biological material obtained directly from a subject (which may be described as the primary sample) as well as any manipulated forms or portions of a primary sample. A sample may also be obtained by contacting a biological material with an exogenous liquid, resulting in the production of a lavage liquid containing some portion of the contacted biological material. Furthermore, the term “sample” is intended to encompass the primary sample after it has been mixed with one or more additive, such as preservatives, chelators, anti-clotting factors, etc.

[0157] In certain embodiments, a bodily fluid sample is a blood sample. In this case, the term “sample” is intended to encompass not only the blood as obtained directly from the patient but also fractions of the blood, such as plasma, serum, cell fractions (e.g., platelets, erythrocytes, and lymphocytes), protein preparations, nucleic acid preparations, etc. In certain embodiments, a bodily fluid sample is a urine sample or a colonic effluent sample. In certain embodiments, a bodily fluid sample is a stool sample. In some embodiments, the bodily fluid may be derived from the stomach, for example, gastric secretions, acid reflux, or vomit. In other embodiments, the bodily fluid may be a fluid secreted by the pancreas or bladder. In other embodiments, the body fluid may be saliva or spit.

[0158] In certain embodiments, a tissue sample is a biopsy taken from the mucosa of the gastrointestinal tract. In other embodiments, a tissue sample is the brushings from, e.g., the colon of a subject.

[0159] A subject is preferably a human subject, but it is expected that the molecular markers disclosed herein, and particularly their homologs from other animals, are of similar utility in other animals. In certain embodiments, it may be possible to detect a biomarker described herein (e.g., DNA methylation or protein expression level) directly in an organism without obtaining a separate portion of biological material. In such instances, the term “sample” is intended to encompass that portion of biological material that is contacted with a reagent or device involved in the detection process.

[0160] In certain embodiments, DNA which is used as the template in an MSP reaction is obtained from a bodily fluid sample. Examples of preferred bodily fluids are blood, serum, plasma, a blood-derived fraction, stool, colonic effluent or urine. Other body fluids can also be used. Because they can be easily obtained from a subject and can be used to screen for multiple diseases, blood or blood-derived fractions are especially useful. For example, it has been shown that DNA alterations in colorectal cancer patients can be detected in the blood of subjects (Hibi, et al., 1998, Cancer Res, 58:1405-7). Blood-derived fractions can comprise blood, serum, plasma, or other fractions. For example, a cellular fraction can be prepared as a “buffy coat” (i.e., leukocyte-enriched blood portion) by centrifuging 5 ml of whole blood for 10 min at 800 times gravity at room temperature. Red blood cells sediment most rapidly and are present as the bottom-most fraction in the centrifuge tube. The buffy coat is present as a thin creamy white colored layer on top of the red blood cells. The plasma portion of the blood forms a layer above the buffy coat. Fractions from blood can also be isolated in a variety of other ways. One method is by taking a fraction or fractions from a gradient used in centrifugation to enrich for a specific size or density of cells.

[0161] DNA is then isolated from samples from the bodily fluids. Procedures for isolation of DNA from such samples are well known to those skilled in the art. Commonly, such DNA isolation procedures comprise lysis of any cells present in the samples using detergents, for example. After cell lysis, proteins are commonly removed from the DNA using various proteases. RNA is removed using RNase. The DNA is then commonly extracted with phenol, precipitated in alcohol and dissolved in an aqueous solution.

### VI. Therapeutic Methods

[0162] In some embodiments, the disclosure provides for a method of determining whether a subject has any one or more of the methylated informative loci disclosed herein that are indicative of the presence of a colon neoplasia (e.g. colon cancer), wherein if the subject is determined to have a colon neoplasia, the subject is treated with an agent that treats the colon neoplasia. In some embodiments, the disclosure provides for a method of treating a subject determined to have colorectal neoplasia (e.g., colorectal cancer). In some embodiments, the treatment of the colorectal neoplasia is surgery (e.g., colectomy, segmental resection, low anterior resection, and proctectomy with colo-anal anastomosis), radiation therapy (e.g., external beam radiation therapy, endocavitary radiation therapy, brachytherapy, radioembolization), and/or chemotherapy (e.g., 5-Fluorouracil (5-FU); Capecitabine (Xeloda®); Irinotecan (Camptosar®); Oxaliplatin (Eloxatin®), FOLFOX: 5-FU, leucovorin, and oxaliplatin; CapeOx: Capecitabine and oxaliplatin; 5-FU and leucovorin, FOLFOX: 5-FU, leucovorin, and oxaliplatin; FOLFIRI: 5-FU, leucovorin, and irinotecan; FOLFOXIRI (leucovorin, 5-FU, oxaliplatin, and irinotecan); CapeOx: Capecitabine and oxaliplatin; 5-FU and leucovorin; Capecitabine; Irinotecan, VEGF targeted drugs such as Bevacizumab (Avastin®) and ziv-aflibercept (Zaltrap®); EGFR targeted drugs such as Cetuximab (Erbitux®) and panitumumab (Vectibix®); kinase inhibitors such as Regorafenib (Stivarga®).

[0163] The terms “treatment”, “treating”, “alleviation” and the like are used herein to generally mean obtaining a desired pharmacologic and/or physiologic effect, and may also be used to refer to improving, alleviating, and/or decreasing the severity of one or more symptoms of a condition being treated. The effect may be prophylactic in terms of completely or partially delaying the onset or recurrence of a disease, condition, or symptoms thereof, and/or may be therapeutic in terms of a partial or complete cure for a disease or condition and/or adverse effect attributable to the disease or condition. “Treatment” as used herein covers any treatment of a disease or condition of a mammal, particularly a human, and includes: (a) preventing the disease or condition from occurring in a subject which may be predisposed to the disease or condition but has not yet been diagnosed as having it; (b) inhibiting the disease or condition (e.g., arresting its development); or (c) relieving the disease or condition (e.g., causing regression of the disease or condition, providing improvement in one or more symptoms).

[0164] Treating a neoplasia (e.g., colorectal cancer) in a subject refers to improving (improving the subject's condition), alleviating, delaying or slowing progression or onset, decreasing the severity of one or more symptoms associated with a colon neoplasia. For example, treating a metaplasia or neoplasia includes any one or more of: reducing growth, proliferation and/or survival of metaplastic/neoplastic cells, killing metaplastic/neoplastic cells (e.g., by necrosis, apoptosis or autophagy), decreasing metaplasia/neoplasia size, decreasing rate of metaplasia/neoplasia size increase, halting increase in metaplasia/neoplasia size, improving ability to swallow, decreasing internal bleeding, decreasing incidence of vomiting, reducing fatigue, decreasing the number of metastases, decreasing pain, increasing survival, and increasing progression free survival.

### EXEMPLIFICATION

[0165] The invention now being generally described, it will be more readily understood by reference to the following examples, which are included merely for purposes of illustration of certain aspects and embodiments of the present invention, and are not intended to limit the invention.

### Example 1: Identification of Colorectal Cancer Informative Loci

[0166] Methylated informative loci were initially identified using the technique of reduced representation bisulfite sequencing (RRBS) in a discovery set of 41 Stage II-IV colon cancers and 25 matched normal colon tissues from 25 of these same patients.

[0167] Discovery data were initially analyzed for each individual CpG residue in the RRBS data set. Individual CpGs were considered methylated in colon cancer if they showed methylation in less than 10% of DNA sequence reads in all of the readable normal samples, where at least 4 normal samples were readable, where a readable normal sample had equal to or greater than 20 reads covering the CpG, and if 50% or more of the readable cancer samples demonstrated percent methylation at a level that was at least 20 percentage points greater than the methylation level of the most methylated normal tissue sample, where a readable cancer sample had equal to or greater than 10 reads covering the CpG. At least 6 readable and methylated cancer samples were required in order to include a CpG on the methylated in colon cancer list. Such methylated CpGs were then aggregated into patches or loci by grouping together methylated CpGs that were within 200 bp of one another. Patches may consist of 1 CpG up to any number of CpGs that meet the above criteria. Fifty methylated patches were identified that correspond to SEQ ID NOs: 1-100. As outlined below, in confirmatory studies, 4 best methylated patches were defined based on defining a window in which defining individual DNA sequencing reads as methylated or unmethylated showed robust differences between normal and cancer tissues.

[0168] Table 1 in columns A-AV is an excerpt of results from these experiments, including four loci having preferred characteristics. In Table 1, column A records names assigned to 4 best genomic patches defined as methylated in colon cancer by RRBS analysis. Column B gives the genomic coordinates of the genomic patches defined as methylated by the above criteria. Columns C and D provide the genomic sequences of these patches on the respective genomic (+) and (−) strands. Columns E and F disclose the bisulfite converted sequences of these corresponding patches, with column E providing the bisulfite converted sequence of the (+) strand and column F providing the bisulfite converted sequence of the (−) strand. C residues that may be methylated or unmethylated, and hence may be bisulfite converted to T (if unmethylated) or remain as a C (if methylated), are designated with a Y (where Y denotes C or T), and where, after bisulfite conversion, actual maintenance of a Y designated base as a C is scored as methylation at that base. Thus, the entries represent the group of all combinations of all sequences in which 0, 1, or more than one Y is converted to a T. The reverse complements of these sequences of columns E and F will be obvious to one of ordinary skill in the art and are also included by implication in this disclosure. Columns G and H disclose the bisulfite converted sequences of the fully methylated form of the corresponding patches (i.e. in which all Y bases in every of the entries of columns E and F respectively are retained as a C), with column G corresponding to the (+) strand and column H corresponding to the (−) strand. The reverse complements of these sequences of columns G and H will be obvious to one of ordinary skill in the art and are also included by implication in this disclosure. Column I discloses the genomic coordinates of the region of interest (ROI) that was used as a target for primer design. The ROI encompasses a preferred region of the patch of column B that was technically attractive for amplification. ROI regions were chosen by extending the patches of column B by 50-200 bp on either side, so as to accommodate either design of amplification primers or to include presumptively methylated bases not directly assayed. Columns J and K provide the genomic sequences of these expanded ROIs on the respective genomic (+) and (−) strands. Columns L and M disclose the bisulfite converted sequences of these ROI regions, with column L providing the bisulfite converted sequence of the (+) strand and column M providing the bisulfite converted sequence of the (−) strand. C residues that may be methylated or unmethylated, and hence may be bisulfite converted to T (if unmethylated) or remain as a C (if methylated), are designated with a Y (where Y denotes C or T), and where, after bisulfite conversion, actual maintenance of a Y designated base as a C is scored as methylation at that base. Thus, the entries represent the group of all combinations of sequences in which 0, 1, or more than one Y is converted to a T. The reverse complements of these sequences of columns L and M will be obvious to one of ordinary skill in the art and are also included by implication in this disclosure. Columns N and O disclose the bisulfite converted sequences of the fully methylated form of the corresponding patches (i.e. in which all Y bases in every of the entries of columns L and N respectively are retained as a C), with column N corresponding to the (+) strand and column O corresponding to the (−) strand. The reverse complements of these sequences of columns N and O will be obvious to one of ordinary skill in the art and are also included by in this description. Column P provides the genomic coordinates of any CpG island that overlaps the patch of column B, and that by implication may be methylated coordinately with the patch of column B. Columns Q and R provide the genomic sequences of these CpG islands on the respective genomic (+) and (−) strands. Columns S and T disclose the bisulfite converted sequences of these corresponding patches, with column S providing the bisulfite converted sequence of the (+) strand and column T providing the bisulfite converted sequence of the (−) strand. C residues that may be methylated or unmethylated, and hence may be bisulfite converted to T (if unmethylated) or remain as a C (if methylated), are designated with a Y (where Y denotes C or T), and where, after bisulfite conversion, actual maintenance of a Y designated base as a C is scored as methylation at that base. Thus, the entries represent the group of all combinations of sequences in which 0, 1, or more than one Y is converted to a T. The reverse complements of these sequences of columns S and T will be obvious to one of ordinary skill in the art and are also included by implication in this disclosure. Columns U and V disclose the bisulfite converted sequences of the fully methylated form of the corresponding patches (i.e. in which all Y bases in every of the entries of columns S and T respectively are retained as a C), with column U corresponding to the (+) strand and column V corresponding to the (−) strand. The reverse complements of these sequences of columns U and V will be obvious to one of ordinary skill in the art and are also included by implication in this disclosure. Column W provides the length of these CpG islands. Column X provides the identity of any genes on the (+) strand that overlaps the patch of column B. Column Y provides the identity of any genes on the (−) strand that overlaps the patch of column B. Column Z identifies the nearest gene on the plus strand that is 3′ (on the plus strand) of the patch in column B. Column AA provides the distance to the identified nearest gene. Column AB identifies the nearest gene on the minus strand that is 3′ (on the minus strand) of the patch in column B. Column AC provides the distance to the identified nearest gene on the (−) strand). Column AD discloses which genomic strand, (+) or (−), was used as the basis for bisulfite-specific amplification for confirmatory analysis by bisulfite sequencing. Columns AE and AF disclose the respective forward and reverse PCR primers that are bisulfite specific and methylation indifferent for use in amplifying the corresponding regions (amplicon1) for bisulfite sequencing. When more than one amplicon was used, Columns AG and AH disclose the respective forward and reverse PCR primers for the second amplicon (amplicon2). In these sequences in columns AE through AH, Y indicates a degenerate base in the primer where Y may be either C or T, and R indicates a degenerate base in the primer where R may be either A or G. Columns AI and AJ disclose the genomic coordinates of the first and second amplicons that were generated for confirmatory analysis by bisulfite sequencing. Columns AK and AL respectively provide the genomic sequence of the (+) strand and the (−) strand) of amplicon1. Columns AM and AN provide the sequences of the (+) and (−) strand of amplicon2, where second amplicon was utilized for confirmatory sequencing. Columns AO and AP disclose the bisulfite converted sequences of these corresponding amplicons, with column AO providing the bisulfite converted sequence of the (+) strand of Amplicon1, and column AP providing the bisulfite converted sequence of the (−) strand of Amplicon1. C residues that may be methylated or unmethylated, and hence may be bisulfite converted to T (if unmethylated) or remain as a C (if methylated), are designated with a Y (where Y denotes C or T), and where, after bisulfite conversion, actual maintenance of a Y designated base as a C is scored as methylation at that base. Thus, the entries represent the group of all combinations of sequences in which 0, 1, or more than one Y is converted to a T. The reverse complements of these sequences of columns AO, AP, AQ and AR will be obvious to one of ordinary skill in the art and are also included by implication in this disclosure. Columns AS and AT disclose the bisulfite converted sequences of the fully methylated form of the amplicon1 (i.e. in which all Y bases in every of the entries of columns L and N respectively are retained as a C), with column AS corresponding to the (+) strand and column AT corresponding to the (−) strand. The reverse complements of these sequences of columns AS and AT will be obvious to one of ordinary skill in the art and are also included by implication in this disclosure.

[0169] Confirmatory analysis of loci from Table 1 was then done by Next Generation sequencing of bisulfite DNAs amplified to generate amplicon1 of Table 1. This employed an expanded sample set of resected colon tissues comprising: 20 Stage II cancers and 20 matching normal colon tissues from the same individuals, 20 Stage IV cancers and 20 matching normal colon tissues from the same individuals. In addition, eight colon cancer cell lines, 4 corresponding to Stage II cancers, and 4 established from Stage IV tumors were included in confirmatory analysis, along with the DNA corresponding to 8 primary tumors matching these cell lines. The most preferred loci were identified based on defining for each locus an analysis window in which defining individual DNA sequencing reads within the window as methylated or unmethylated showed robust differences between normal and cancer tissues.

[0170] Column AW provides the genomic coordinates of an exemplary small window1 for the four preferred loci. The window1 denotes a smaller CpG dense area within the ROI (“Region of Interest”) of column I, that was technically attractive for amplification of small DNA fragments, and that showed the best sensitivity and specificity for distinguishing cancer from normal tissue. The smaller size of window1 makes this region advantageous for use in analysis of DNA from body fluids because DNA from such samples may be degraded to smaller fragment size. Column AX provides the genomic sequence of the (+) strand of window1, and column AY provides the genomic sequence of the (−) strand of window1. Columns AZ and BA provide the bisulfite converted sequences of window1, with column AZ corresponding to the (+) strand and column BA corresponding to the (−) strand of window1. C residues that may be methylated or unmethylated, and hence may be bisulfite converted to T (if unmethylated) or remain as a C (if methylated), are designated with a Y (where Y denotes C or T), and where, after bisulfite conversion, actual maintenance of a Y designated base as a C is scored as methylation at that base. Thus, the entries represent the group of all combinations of sequences in which 0, 1, or more than one Y is converted to a T. The reverse complements of these sequences of columns AZ and BA will be obvious to one of ordinary skill in the art and are also included by implication in this disclosure. Columns BB and BC provide the bisulfite converted sequences of the fully methylated form of the corresponding window1 sequences, with BB corresponding to AZ and BC corresponding to BA (i.e., in which all Y bases in every of the entries of column BB and BC are retained as a C). The reverse complements of these sequences of column BB and BC will be obvious to one of ordinary skill in the art and are also included by implication in this disclosure.

[0171] When more than one window was designed, column BD provides the genomic coordinates of the second window (window2) that was technically attractive for amplification of small DNA fragments, and that also showed best sensitivity and specificity for distinguishing cancer from normal tissue. Column BE provides the genomic sequence of the (+) strand of window2, and column BF provides the corresponding (−) strand sequence. Columns BG and BH provide the bisulfite converted sequence of the (+) and (−) strand of window2, with the column BG corresponding to the bisulfite-converted (+) strand, and column BH corresponding to bisulfite-converted (−) strand. C residues that may be methylated or unmethylated, and hence may be bisulfite converted to T (if unmethylated) or remain as a C (if methylated), are designated with a Y (where Y denotes C or T), and where, after bisulfite conversion, actual maintenance of a Y designated base as a C is scored as methylation at that base. Thus, the entries represent the group of all combinations of sequences in which 0, 1, or more than one Y is converted to a T. The reverse complements of these sequences of column BG and BH will be obvious to one of ordinary skill in the art and are also included by implication in this disclosure. Columns BI and BJ provide the bisulfite converted sequences of the fully methylated form of the corresponding window2 sequences, with BI corresponding to column BG, and BJ corresponding to column BH (i.e., in which all Y bases in every of the entries of column BG and BH are retained as a C). The reverse complements of these sequences of columns BI and BJ will be obvious to one of ordinary skill in the art and are also included by implication in this disclosure.

[0172] Columns BK and BL provide the respective forward and reverse PCR primers that are bisulfite specific and methylation indifferent for use in amplifying the corresponding small window regions (window1) for bisulfite sequencing. When more than one window was used, Columns BM and BN provide the respective forward and reverse PCR primers for the second window (window2). In these sequences in columns BK through BN, Y indicates a degenerate base in the primer where Y may be either C or T, and R indicates a degenerate base in the primer where R may be either A or G.

TABLE 1A

| | | | | | | G | H |
|---|---|---|---|---|---|---|---|
| | | | | E | F | Patch | Patch |
| | | C | | Patch | Patch | sequence | sequence |
| | | Patch | D | sequence | sequence | (+) strand- | (−) strand- |
| | | sequence | Patch | (+) | (−) strand- | BS | BS |
| | B | (+) | sequence | strand-BS | BS | converted, | converted, |
| | patch | strand | (−) strand | converted | converted | Methylated | Methylated |
| A | coordinates | (SEQ ID | (SEQ ID | (SEQ ID | (SEQ ID | (SEQ ID | (SEQ ID |
| Patch_ID | (hg19) | NO) | NO) | NO) | NO) | NO) | NO) |
| Un_Up_106 | chr6: 163834786-163834910 | 1629 | 1633 | 1637 | 1641 | 1645 | 1649 |
| Un_Up_146 | chr8: 97506549-97506612 | 1630 | 1634 | 1638 | 1642 | 1646 | 1650 |
| Un_Up_207 | chr12: 113494789-113494900 | 1631 | 1635 | 1639 | 1643 | 1647 | 1651 |
| Un_Up_307 | chr22: 39853283-39853292 | 1632 | 1636 | 1640 | 1644 | 1648 | 1652 |

TABLE 1B

| | | | | L | M | N | O |
|---|---|---|---|---|---|---|---|
| | | | | ROI | ROI | ROI | ROI |
| | | J | | sequence | sequence | sequence | sequence |
| | | ROI | K | (+) | (−) | (+) strand- | (−) strand- |
| | | sequence | ROI | strand- | strand- | BS- | BS- |
| | | (+) | sequence | BS- | BS- | converted, | converted, |
| | I | strand | (−) strand | converted | converted | Methylated | Methylated |
| | ROI coordinates, | (SEQ ID | (SEQ ID | (SEQ ID | (SEQ ID | (SEQ ID | (SEQ ID |
| A | (hg19) | NO) | NO) | NO) | NO) | NO) | NO) |
| Un_Up_106 | chr6: 163834539-163835189 | 1653 | 1657 | 1661 | 1665 | 1669 | 1673 |
| Un_Up_146 | chr8: 97506327-97506856 | 1654 | 1658 | 1662 | 1666 | 1670 | 1674 |
| Un_Up_207 | chr12: 113494613-113495060 | 1655 | 1659 | 1663 | 1667 | 1671 | 1675 |
| Un_Up_307 | chr22: 39853093-39853488 | 1656 | 1660 | 1664 | 1668 | 1672 | 1676 |

TABLE 1C

| | | | | | | U | |
|---|---|---|---|---|---|---|---|
| | | | | | | CpG_Island | V |
| | | | | S | T | (+) | CpG_Island |
| | | Q | | CpG_Island | CpG_Island | strand- | (−) strand- |
| | | CpG_Island | R | (+) strand- | (−) strand | BS- | BS- |
| | P | (+) | CpG_Island | BS- | BS- | converted- | converted- |
| | CpG | strand | (−) strand | converted | converted | Methylated | Methylated |
| A | island_chr: | (SEQ ID | (SEQ ID | (SEQ ID | (SEQ ID | (SEQ ID | (SEQ ID |
| Patch_ID | start-stop | NO) | NO) | NO) | NO) | NO) | NO) |
| Un_Up_106 | | | | | | | |
| Un_Up_146 | chr8: 97505747-97507607 | 1677 | 1679 | 1681 | 1683 | 1685 | 1687 |
| Un_Up_207 | chr12: 113494389-113495534 | 1678 | 1680 | 1682 | 1684 | 1686 | 1688 |
| Un_Up_307 | | | | | | | |

TABLE 1D

| | | X | Y | |
|---|---|---|---|---|
| | | onTARGET | onTARGET | Z |
| A | W | genes | genes | Nearest neighbor_GENES |
| Patch_IB | CpG_Island_length | (+strand) | (−strand) | (+strand) |
| Un_Up_106 | | | | QKI(NM_006775) |
| | | | | [quaking homolog KH domain |
| | | | | RNA binding |
| | | | | (mouse)]<chr6: 163835674-163999628>, |
| | | | | QKI(NM_206853) |
| | | | | [quaking homolog KH |
| | | | | domain RNA binding |
| | | | | (mouse)]<chr6: 163835674-163999628>, |
| | | | | QKI(NM_206854) |
| | | | | [quaking homolog KH |
| | | | | domain RNA binding |
| | | | | (mouse)]<chr6: 1638356 |
| Un_Up_146 | 1860 | SDC2(NM_002998) | | PGCP(NM_016134)[plasma |
| | | [syndecan 2] | | glutamate carboxy- |
| | | <chr8: 97505881-97624037> | | peptidase]<chr8: 97657498-98155722> |
| Un_Up_207 | 1145 | | | DTK1(NM_004416)[deltex |
| | | | | homolog 1 (Drosophila)] |
| | | | | <chr12: 113495661-113535833> |
| Un_Up_307 | | | | MGAT3(NM_002409) |
| | | | | [mannosyl (beta-1 4-)- |
| | | | | glycoprotein beta-1 4-N- |
| | | | | acetylglucosaminyltransferase] |
| | | | | <chr22: 39853324-39888199> |

| | AA | | AC |
|---|---|---|---|
| | Nearest | AB | Nearest |
| A | neighbor_distance | Nearest neighbor_GENES | neighbor_distance |
| Patch_IB | (+strand) | (−strand) | (−strand) |
| Un_Up_106 | 888 | LINC-PARK2-3(line- | 20554 |
| | | PARK2-3)<chr6: 163810451-163814232> | |
| Un_Up_146 | 150949 | LINC-MTERFD1(line- | 107904 |
| | | MTERFD1)<chr8: 97379635-97398645> | |
| Un_Up_207 | 872 | RPL6P27/RPL6/RPL6P19/ | 647346 |
| | | RPL6P10(NM_000970) | |
| | | [ribosomal protein L6 | |
| | | pseudogene 27; ribosomal | |
| | | protein L6 pseudogene 19; | |
| | | ribosomal protein L6; | |
| | | ribosomal protein L6 | |
| | | pseudogene | |
| | | 10]<chr12: 112842993-112847443>, | |
| | | RPL6P27/ | |
| | | RPL6/RPL6P19/RPL6P10 | |
| | | (NM_001024662)[ribosoma | |
| Un_Up_307 | 41 | RPL3/ | 137613 |
| | | LOC653881(NM_000967) | |
| | | [ribosomal protein L3; similar | |
| | | to 60S ribosomal | |
| | | protein L3 | |
| | | (L4)]<chr22: 39708886-39715670>, | |
| | | RPL3/ | |
| | | LOC653881(NM_001033853) | |
| | | [ribosomal protein L3; | |
| | | similar to 60S ribosomal | |
| | | protein L3 | |
| | | (L4)]<chr22: 39708886-39715670> | |

TABLE 1E

| | | AE | AF | | | | |
|---|---|---|---|---|---|---|---|
| | | Forward | Reverse | | | | |
| | AD | Primer | primer | AG | AH | AI | AJ |
| | Amplicon | Amplicon1 | Amplicon1 | Forward | Reverse | Amplicon1 | Amplicon2 |
| A | designed | (SEQ ID | (SEQ ID | Primer | primer | coordinates | coordinates |
| Patch_IB | against: | NO) | NO) | Amplicon2 | Amplicon2 | (hg19) | (hg19) |
| Un_Up_106 | (+) Strand | 1689 | 1693 | | | chr6: | |
| | | | | | | 163834751-163834941 | |
| Un_Up_146 | (−) Strand | 1690 | 1694 | | | chr8: | |
| | | | | | | 97506516-97506680 | |
| Un_Up_207 | (+) Strand | 1691 | 1695 | | | chr12: | |
| | | | | | | 113494734-113494933 | |
| Un_Up_307 | (+) Strand | 1692 | 1696 | | | chr22: | |
| | | | | | | 39853180-39853369 | |

TABLE 1F

| | AK | AL | | |
|---|---|---|---|---|
| | Amplicon1 | Amplicon1 | AM | |
| | sequence, | sequence, | Amplicon2 | AN |
| | (+) strand | (−) strand | sequence, | Amplicon2 |
| A | (SEQ ID | (SEQ | (+) | sequence, |
| Patch_ID | NO) | ID NO) | strand | (−) strand |
| Un_Up_106 | 1697 | 1701 | | |
| Un_Up_146 | 1698 | 1702 | | |
| Un_Up_207 | 1699 | 1703 | | |
| Un_Up_307 | 1700 | 1704 | | |

TABLE 1G

| | | | AS | AT |
|---|---|---|---|---|
| | AO | AP | Amplicon1 | Amplicon1 |
| | Amplicon1 | Amplicon1 | sequence, | sequence, |
| | sequence, | sequence, | (+) strand- | (−) strand- |
| | (+) strand- | (−) strand- | BS- | BS- |
| | BS- | BS- | converted, | converted, |
| | converted | converted | Methylated | Methylated |
| A | (SEQ ID | (SEQ ID | (SEQ ID | (SEQ ID |
| Patch_ID | NO) | NO) | NO) | NO) |
| Un_Up_106 | 1705 | 1709 | 1713 | 1717 |
| Un_Up_146 | 1706 | 1710 | 1714 | 1718 |
| Un_Up_207 | 1707 | 1711 | 1715 | 1719 |
| Un_Up_307 | 1708 | 1712 | 1716 | 1720 |

TABLE 1H

| | | | | | | BB | BC |
|---|---|---|---|---|---|---|---|
| | | | | AZ | BA | Best small | Best small |
| | | AX | AY | Best small | Best small | window1 (+) | window1 |
| | | Best small | Best small | window1 (+) | window1 | strand, BS- | (−) strand, BS- |
| | AW | window1 (+) | window1 (−) | strand, BS- | (−) strand, BS- | converted- | converted- |
| A | Best small window1 | strand (SEQ | strand (SEQ | converted (SEQ | converted (SEQ | Methylated | Methylated |
| Patch_ID | coordinates (hg19) | ID NO) | ID NO) | ID NO) | ID NO) | (SEQ ID NO) | (SEQ ID NO) |
| Un_Up_106 | chr6: 163834750-163834862 | 1721 | 1725 | 1729 | 1733 | 1737 | 1741 |
| Un_Up_146 | chr8: 97506522-97506632 | 1722 | 1726 | 1730 | 1734 | 1738 | 1742 |
| Un_Up_207 | chr12: 113494734-113494841 | 1723 | 1727 | 1731 | 1735 | 1739 | 1743 |
| Un_Up_307 | chr22: 39853251-39853365 | 1724 | 1728 | 1732 | 1736 | 1740 | 1744 |

TABLE 1I

| | | | | | | | BJ |
|---|---|---|---|---|---|---|---|
| | | | | | | BI | Best small |
| | | | | BG | BH | Best small | window2 |
| | | BE | BF | Best small | Best small | window2 (+) | (−) strand, |
| | BD | Best small | Best small | window2 (+) | window2 (−) | strand, BS- | BS- |
| | Best small | window2 | window2 | strand, BS- | strand, BS- | converted- | converted- |
| | window2 | (+) strand | (−) strand | converted | converted | Methylated | Methylated |
| A | coordinates | (SEQ ID | (SEQ ID | (SEQ ID | (SEQ ID | (SEQ | (SEQ |
| Patch_ID | (hg19) | NO) | NO) | NO) | NO) | ID NO) | ID NO) |
| Un_Up_106 | | | | | | | |
| Un_Up_146 | chr8: | 1745 | 1746 | 1747 | 1748 | 1749 | 1750 |
| | 97506528-97506643 | | | | | | |
| Un_Up_207 | | | | | | | |
| Un_Up_307 | | | | | | | |

TABLE 1J

| | BK | BL | BM | BN |
|---|---|---|---|---|
| | Small | Small | Small | Small |
| | window1 | window1 | window2 | window2 |
| | F primer | R primer | F primer | R primer |
| A | (SEQ ID | (SEQ ID | (SEQ ID | (SEQ ID |
| Patch_ID | NO) | NO) | NO) | NO) |
| Un_Up_106 | 1751 | 1755 | | |
| Un_Up_146 | 1752 | 1756 | 1759 | 1760 |
| Un_Up_207 | 1753 | 1757 | | |
| Un_Up_307 | 1754 | 1758 | | |

TABLE 2A

| A | B | C | D | E | F | G | H | I |
|---|---|---|---|---|---|---|---|---|
| Patch | VIM | Un_Up_35 | Un_Up_62 | Un_Up_100 | Un_Up_106 | Un_Up_146 | Un_Up_177 | Un_Up_190 |
| Number of | 10 | 23 | 31 | 19 | 20 | 12 | 19 | 13 |
| CpGs in | | | | | | | | |
| amplicon | | | | | | | | |
| CpG used | 10+ | 22+ | 22+ | 15+ | 18+ | 11+ | 17+ | 11+ |
| Cutoff 0.1 | 54% | 75% | 18% | 21% | 58% | 90% | 63% | 67% |
| Sensitivity | | | | | | | | |
| Cutoff 0.1 | 100% | 100% | 100% | 100% | 100% | 97% | 100% | 100% |
| Specificity | | | | | | | | |
| Cut-off | 97% | 92% | 100% | 97% | 97% | 92% | 97% | 92% |
| 0.01 | | | | | | | | |
| Specificity | | | | | | | | |

| | | | | | | O |
|---|---|---|---|---|---|---|
| | | | | | | 2 cleanest |
| | | | | | | markers |
| | | | L | | | together: |
| A | J | K | Un_Up_254 | M | N | Un-Up-62, |
| Patch | Un_Up_207 | Un_Up_229 | ampiicon1 | Un_Up_280 | Un_Up_307 | Un-Up_229 |
| Number of | 18 | 7 | 28 | 13 | 34 | |
| CpGs in | | | | | | |
| amplicon | | | | | | |
| CpG used | 15+ | 6+ | 22+ | 11+ | 25+ | |
| Cutoff 0.1 | 67% | 6% | 77% | 72% | 91% | 19% |
| Sensitivity | | | | | | |
| Cutoff 0.1 | 100% | 100% | 100% | 100% | 100% | 100% |
| Specificity | | | | | | |
| Cut-off | 97% | 100% | 95% | 95% | 97% | 100% |
| 0.01 | | | | | | |
| Specificity | | | | | | |

TABLE 2B

| | P | | | | | | | |
|---|---|---|---|---|---|---|---|---|
| | Combining | | | | | | | |
| | NEW | | | | | | | |
| | markers with | | | | | | | |
| | >=97% | | | | | | | |
| | specificity at | | | | | | | |
| | 0.01 cutoff | | | | | | | |
| | (Un_Up_62, | | | | | | | |
| A | Un_Up_100, | | | | | | | |
| Patch | Un_Up_106, | | | | | | | |
| Number of | Un_Up_177, | | | S | T | | | |
| CpGs in | Un_Up_207, | Q | R | Un_Up_254 | Un_Up_146 | U | V | W |
| amplicon | Un_Up_229, | Un_Up_106 | Un_Up_280 | amplicon1 | Un_Up_254 | Un_Up_177 | Un_Up_146 | Un_Up_106 |
| CpG used | Un_Up_307) | Un_Up_146 | Un_Up_307 | Un_Up_307 | amplicon1 | Un_Up_307 | Un_Up_307 | Un_Up_307 |
| Cutoff 0.1 | 96% | 94% | 94% | 94% | 94% | 94% | 94% | 94% |
| Sensitivity | | | | | | | | |
| Cutoff 0.1 | 100% | 98% | 100% | 100% | 98% | 100% | 98% | 100% |
| Specificity | | | | | | | | |
| Cut-off 0.01 | 88% | 93% | 93% | 93% | 88% | 95% | 90% | 95% |
| Specificity | | | | | | | | |

TABLE 2C

| A | | | | | | | AD | AE |
|---|---|---|---|---|---|---|---|---|
| Patch | | Y | | AA | | AC | Un_Up_106 | Un_Up_146 |
| Number of | X | Un_Up_106 | Z | Un_Up_177 | AB | Un_Up_106 | Un_Up_146 | Un_Up_177 |
| CpGs | Un_Up_106 | Un_Up_254 | Un_Up_106 | Un_Up_254 | Un_Up_177 | Un_Up_146 | Un_Up_254 | Un_Up_254 |
| amplicon | Un_Up_177 | amplicon1 | Un_Up_280 | amplicon1 | Un_Up_280 | Un_Up_280 | amplicon1 | amplicon1 |
| CpG used | Un_Up_307 | Un_Up_307 | Un_Up_307 | Un_Up_307 | Un_Up_307 | Un_Up_307 | Un_Up_307 | Un_Up_307 |
| Cutoff 0.1 | 96% | 94% | 96% | 96% | 94% | 96% | 96% | 96% |
| Sensitivity | | | | | | | | |
| Cutoff 0.1 | 100% | 100% | 100% | 100% | 100% | 98% | 98% | 98% |
| Specificity | | | | | | | | |
| Cut-off 0.01 | 93% | 90% | 90% | 90% | 90% | 85% | 85% | 85% |
| Specificity | | | | | | | | |

[0173] Table 2 describes the performance of amplicons of specific loci identified in this study and based on the analysis of the bisulfite sequencing data from the confirmatory data set. In Table 2, columns C-N disclose the performance of amplicons of specific loci. For each DNA sequence read across each amplicon the number of CpGs that were methylated was counted and the read was classified as methylated or unmethyled using cutoffs for the number of methylated CpGs on the amplicon. Row 3 lists the number of CpGs between the amplification primers for each of the amplicons. Row 4 lists the number of CpGs that need to be methylated on an individual read to count that read as methylated (e.g. for Un_Up_35 there are 23 CpG residues between the primers, and 22+ (meaning >=22) CpGs must be methylated on a read to score it as methylated.

[0174] Row 5 records the sensitivity for detecting colon tumors, using criteria in which a sample was detected if it demonstrated methylation in greater than 10% (0.1) of all DNA reads. Row 6 records the specificity of each amplicon for not detecting normal colon again using criteria in which a sample was detected if it demonstrated methylation in greater than 10% (0.1) of all DNA reads. Row 7 records the specificity of each amplicon for not detecting normal colon now using criteria in which a sample was detected if it demonstrated methylation in greater than 1% (0.01) of all DNA reads. As a comparator, column B provides the same data for detecting methylation in the Vimentin (VIM) locus amplified using primers disclosed in Li et al. (Li M, et al. (2009) Sensitive digital quantification of DNA methylation in clinical samples. Nat Biotechnol 27(9):858-863). Genomic coordinates for the VIM locus analyzed are chr10: 17271466-17271520, and the primers for amplifying the VIM locus had the sequences of SEQ ID NOs: 1761 and 1762. The VIM locus amplicon is similar in size to the windows selected in Table 1. Amplicons need not be used individually, but can be combined into panels for detection of colon neoplasias. Examples of such panels, and their associated performance statistics, are provided in columns O through AE that provide the markers in the panel and the sensitivity and specificity resulting from the marker combination.

[0175] The sensitivity for detection colon cancer (96%) is the same among the combinations shown of: 7 amplicons of column P, three combinations of 4 amplicons (columns AC-AE), and three of five combinations of 3 amplicons (columns X, Z, AA).

[0176] Specificity for not detecting normal colon (100%), at a detection cutoff of 10% of reads being methylated, is the same among the combinations shown of: 7 amplicons of column P, all combinations of 3 amplicons (columns X-AB), and some combinations of 2 amplicons (columns R, S, U, W). When specificity is determined using a cutoff of 1% of reads being methylated, then among amplicons having 96% sensitivity, the highest specificity is 93%, demonstrated by one combination of 3 amplicons (column X). When specificity is determined using a cutoff of 1% of reads being methylated, then among amplicons of 94% sensitivity, the highest specificity is 95%, demonstrated by the combination of 2 amplicons in columns U and W; among amplicons of 94% sensitivity, 93% specificity is demonstrated by three combinations of 2 amplicons (Table 2, columns Q, R, S).

[0177] Table 3 describes the performance of the small windows selected from Table 1 in the analysis of the confirmatory data set. In Table 3, columns E-I disclose the performance of the computationally-selected windows of Table 1 in the confirmatory data set. For each DNA sequence read across each window the number of CpGs that were methylated was counted and the read was classified as methylated or unmethyled using cutoffs for the number of methylated CpGs on the amplicon. Where more than 1 window was selected from the original amplicon, row 3 lists the window number corresponding to Table 1. Row 4 lists the number of CpGs that need to be methylated on an individual read to count that read as methylated (e.g for Un_Up_106 window1, 10+ (meaning >=10). CpGs must be methylated on a read to score it as methylated.

[0178] Row 5 records the sensitivity for detecting colon tumors, using criteria in which a sample was detected if it demonstrated methylation in greater than 10% (0.1) of all DNA reads. Row 6 records the specificity of each window for not detecting normal colon again using criteria in which a sample was detected if it demonstrated methylation in greater than 10% (0.1) of all DNA reads. Row 7 records the specificity of each window for not detecting normal colon now using criteria in which a sample was detected if it demonstrated methylation in greater than 1% (0.01) of all DNA reads. As a comparator, column D provides the same data for detecting methylation in the Vimentin (VIM) locus amplified using primers disclosed in Li et al. (Li M, et al. (2009) Sensitive digital quantification of DNA methylation in clinical samples. Nat Biotechnol 27(9):858-863). Genomic coordinates for the VIM locus analyzed are chr10: 17271466-17271520, and the primers for amplifying the VIM locus had the sequences of SEQ ID NOs: 1761 and 1762. The VIM locus amplicon is similar in size to the windows selected in Table 1.

[0179] Windows need not be used individually, but can be combined into panels for detection of colon neoplasia. An example of such a panel that was analyzed was Un-up-106, Un-up_207, Un-up_307, and the sensitivity and specificity performance statistics resulting from this marker combination is provided in Table 3, column J. The combination of the 3 windows provided in column J has 92% sensitivity for detection of colon cancer. Specificity for not detecting normal colon is 100%, at a detection cutoff of 10% of reads being methylated, and remains at 100% when specificity is determined using a cutoff of 1% of reads being methylated.

TABLE 3

| A | | | D | E | F | G | H | I | J |
|---|---|---|---|---|---|---|---|---|---|
| Patch | B | C | VIM | Un_up_106 | Un_up_146 | Un_up_146 | Un_up_207 | Un_up_307 | Panel |
| Window# | | | | 1 | 1 | 2 | 1 | 1 | |
| CpG used | | | 10+ | 10+ | 9+ | 8+ | 8+ | 12+ | |
| Cut-off = | Sensitivity | | 54% | 52% | 88% | 85% | 54% | 78% | 92% |
| 0.1 | for tumors | | | | | | | | |
| Cut-off = | Specificity | | 100% | 100% | 97% | 97% | 100% | 100% | 100% |
| 0.1 | for normals | | | | | | | | |
| Cutt-off = | Specificity | | 97% | 100% | 95% | 95% | 100% | 100% | 100% |
| 0.01 | for normals | | | | | | | | |

### Example 2: Validation of Colorectal Cancer Informative Loci

[0180] The specificity and sensitivity of three of the strongest methylated colon cancer markers previously identified (i.e., Un-up-146; Un-up-207; and Un-up-307) were determined using a fresh set of colon tumor and normal colon samples. A summary of the results are shown in FIG. 1. Marker Un-up-146 was tested for methylation within both window1 (w1) and window2 (w2). Methylation was assayed by amplifying the windows with the bisulfite specific and methylation indifferent PCR primers disclosed in the application. The number of CpGs within an amplicon that were required to be methylated to score a read as “methylated” is shown as the “# Methyl CpG for positive call”. Sensitivity was scored as the percent of tumors that showed greater than 10% of reads being methylated at each marker. Specificity was scored 1-false positive rate, where false positives were scored as normal samples that showed greater than 1% of reads being methylated at each marker.

[0181] Marker Un-up-146 was further characterized using bisulfite sequencing in plasma versus colon samples from subjects having colon cancer or healthy control subjects. FIG. 2 shows graphs that show the sensitivity (Sens) for detecting a tumor sample or blood from a cancer patient, and the specificity (Sp) for not detecting a normal colon tissue or the blood from a control normal patient. FIG. 2A shows data for normal colon and colon tumors (N/T pairs). FIG. 2B shows data from plasma samples. Curves show the percent of samples detected (sensitivity) or not detected (specificity) when individual DNA reads that are called positive based on detection of methylation (i.e. retention of unconverted cytosine residues) at greater than or equal to the cutoff specified on the X-axis (e.g. 6+ designates a DNA read is termed methylated if greater than or equal to 6 CpG cytosines are detected as methylated in between the amplification primers). Curves show the percent of samples that are detected (sensitivity) or rejected (specificity) based on detecting a greater than or equal to percentage of DNA reads as being methylated (Y-axis). As demonstrated in FIGS. 2A and 2B, the plasma samples showed a lower methylation background than normal colon tissue when using cutoffs of 6+ CpG for calling a DNA read as methylated and 2% methylated reads for calling a sample as methylated is 100% specific in blood, but 57% specific in colon tissue. Un_Up_146 can be analyzed in plasma at a cut-off of 6+ CpG for calling a DNA read methylated and of 0.02 fraction of methylated reads for calling a sample as methylated.

[0182] In an additional experiment, methylation of VIM was compared to methylation of Un_UpUI46 in the samples described in FIG. 2. As demonstrated in FIGS. 3A and 3B, Vim remained 100% specific in plasma at a cutoff of 6+ CpG for calling a DNA read as methylated and 1% methylated reads for calling a sample as methylated. Un_Up_146 remains 100% specific at a cutoff of 6+ CpG for calling a DNA read as methylated and 2% methylated reads for calling a sample as methylated. FIG. 4 provides a tabular summary of the sensitivity and specificity of the assay of plasma samples for Vim methylation and for Un_Up-146 methylation when the markers are analyzed either individually or in combination. Patients were further categorized as having either early stage (stage I or stage II) colon cancer, or as having late stage (stage III, stage IV, or metastatic recurrence) colon cancer. The combination of Vim plus Un_Up_146 methylation assays provides increased sensitivity for detection of individuals with early and with late stage colon cancers.

The application's sequence listing, which the Patent Office published only in electronic form, follows.

SEQUENCE LISTING (1762 sequences)

SEQ ID NO: 1 - DNA, 30 bp, Homo sapiens
cgggagttcggggagaggcggggtttttcg

SEQ ID NO: 2 - DNA, 2 bp, Homo sapiens
cg

SEQ ID NO: 3 - DNA, 106 bp, Homo sapiens
cgctgatgctactgcacccgccgccgcagctgtcgcctttcctgcagccccacggccagcaggtgccctactacctggagaacgagcccagcggctacacggtgcg

SEQ ID NO: 4 - DNA, 125 bp, Homo sapiens
cgcctcgaaaagcctcaaactcttatcctcggctctcccgccccacctccgccccgcagccaagacccgcgccgtggcgggcccgacggccaaggaaagcccaccagccctccgcaccgtgggcg

SEQ ID NO: 5 - DNA, 154 bp, Homo sapiens
cgccgctggcgtccaagttggcgcgttgcggagggctgcggggtgagccctgcggcccctctagcttcggcggtcacatttccgagaggtcggcgggggctgcgcggactcggtggtcctcgccgagccctcccgagagcaggcccacgccgcg

SEQ ID NO: 6 - DNA, 2 bp, Homo sapiens
cg

SEQ ID NO: 7 - DNA, 204 bp, Homo sapiens
cgcccgtctcctcctccgccctctcccgactgcagcgggggcagcgctttggcgctcccaaggactccccgccactctccccacaaagcagcggcggtggcggcggctgctgctggatcttcacactgcagccagcagcccaggacgcccccggccggacgatgggtacccgcgcctgagcatcccccgggcaggcgccaggcg

SEQ ID NO: 8 - DNA, 2 bp, Homo sapiens
cg

SEQ ID NO: 9 - DNA, 2 bp, Homo sapiens
cg

SEQ ID NO: 10 - DNA, 151 bp, Homo sapiens
cgcgccgcacgctgggagcttgatttgcccctttcagaccatgtgggcctttcatttgcatatttccgaattatagatgaaaacgtatccaggatcaagtgaattgttttcctttgagtcctcttgggacagaaaaggaagtaggtccccg

SEQ ID NO: 11 - DNA, 72 bp, Homo sapiens
cggggcgggctcgggggcggggcgtcctcctggccccgcccctcggctcactgcctcacgctgctttccccg

SEQ ID NO: 12 - DNA, 82 bp, Homo sapiens
cgcctctgctgcaggctgcgtgctgcctcggggcggtggtaccctccctcctcggccccaaccgccaggcctgccgtttgcg

SEQ ID NO: 13 - DNA, 64 bp, Homo sapiens
cggcggagtcggtgagtgggccaggcggaggatgcgcgcgccgtttagggtgtttgaagctacg

SEQ ID NO: 14 - DNA, 6 bp, Homo sapiens
cgtccg

SEQ ID NO: 15 - DNA, 110 bp, Homo sapiens
cggccctggtccaggtgcgagtgcgggagctgcgcaagggcgaagcggagcggggcggcgcgggcggtggcgggaagctcttttcactctgcgcctgggatgggcgcgcg

SEQ ID NO: 16 - DNA, 2 bp, Homo sapiens
cg

SEQ ID NO: 17 - DNA, 63 bp, Homo sapiens
cggggagctgtgggctgcgggctgggcggggcggcgcgatgcggggcgggcggctcagccccg

SEQ ID NO: 18 - DNA, 6 bp, Homo sapiens
cgggcg

SEQ ID NO: 19 - DNA, 2 bp, Homo sapiens
cg

SEQ ID NO: 20 - DNA, 2 bp, Homo sapiens
cg

SEQ ID NO: 21 - DNA, 2 bp, Homo sapiens
cg

SEQ ID NO: 22 - DNA, 112 bp, Homo sapiens
cgctgggggcccgcgagcggctcggggacgtctgggctggggaagcggggctgttacccccagggcgggaggcagagacgatccagctcctggcttcgccccctccgcgacg

SEQ ID NO: 23 - DNA, 82 bp, Homo sapiens
cgcaggcctggacaaagctcttaagatgtccctgccgcggaggtcgaggatccgctcgtccgtgggtgagctgggaggggcg

SEQ ID NO: 24 - DNA, 2 bp, Homo sapiens
cg

SEQ ID NO: 25 - DNA, 112 bp, Homo sapiens
cggcttttctaaaggaagggcagaccccagatttcccccttctcttctcgaacgtgctttgggtgtttttctgctttcttttttggcaagtcaggacagcgcacagtgcacg

SEQ ID NO: 26 - DNA, 124 bp, Homo sapiens
cggcccgcggctgccccgcgctcgggaagctctggctggggctgcggtcggagggcggcgcccaagttttcttgaaggcctcggagggcagctggagcggcgtagagcctgcgcggggatggcg

SEQ ID NO: 27 - DNA, 2 bp, Homo sapiens
cg

SEQ ID NO: 28 - DNA, 156 bp, Homo sapiens
cgttctcgttgtctccttcggccgccgcttcctggcgccagagggaccccgcggcccgcacgggcctgtcctcggctccgctcggagggtgtgcgggttcccgctccgctggccccgcttgcccaccacggcgcgcccaaacccacgcggcccgcg

SEQ ID NO: 29 - DNA, 48 bp, Homo sapiens
cgcccccgcctggcccctgtgcgccccgacccgacgcctccccgcccg

SEQ ID NO: 30 - DNA, 63 bp, Homo sapiens
cgggcactctccagggctgtcaggccctccccagccctgcacctgccgcgccgccccacctcg

SEQ ID NO: 31 - DNA, 6 bp, Homo sapiens
cgggcg

SEQ ID NO: 32 - DNA, 91 bp, Homo sapiens
cgcgggggcgggcggaggggcccgcagtgggcggggtcgcggcaggggccgcgagctggcggcgggagctggaggctgccctgcgctggcg

SEQ ID NO: 33 - DNA, 142 bp, Homo sapiens
cgagtctaggaggcggcgctggcgtgcgctactctcgccttagccaaggtcccctgcccgcccgcgcacccgcccgtcgcccgcggcccgcgcgcccttcctccctctcgctcaagtcaaacaggtcaaggctggggccgcg

SEQ ID NO: 34 - DNA, 12 bp, Homo sapiens
cgcccaggtccg

SEQ ID NO: 35 - DNA, 52 bp, Homo sapiens
cgagaacactgcccttggcagtgcagggcgcccccacttattactcccctcg

SEQ ID NO: 36 - DNA, 2 bp, Homo sapiens
cg

SEQ ID NO: 37 - DNA, 95 bp, Homo sapiens
cggcgcctagcgcgaggcagggtgggcgaggcgagggcggcgccctgcgagggagggcggtcgcagaacctgcgggccttcagcgccccctggcg

SEQ ID NO: 38 - DNA, 10 bp, Homo sapiens
cgtccgctcg

SEQ ID NO: 39 - DNA, 2 bp, Homo sapiens
cg

SEQ ID NO: 40 - DNA, 41 bp, Homo sapiens
cgggcgggggcgggcgcctggcttgggcagcgtcctcagcg

SEQ ID NO: 41 - DNA, 2 bp, Homo sapiens
cg

SEQ ID NO: 42 - DNA, 2 bp, Homo sapiens
cg

SEQ ID NO: 43 - DNA, 20 bp, Homo sapiens
cggacgtgggtcggcggccg

SEQ ID NO: 44 - DNA, 301 bp, Homo sapiens
cggcgatcgctgctcctcctcctccttctcctcctcttttttctcctccgcctcctccccccgccgcctcgccaccgccgcggctagggctggaggcgccgctgtcattcctgtgccggaggaaccggcgctgccggtgcctgggggtcggggcgcgggcgaagccgggccgcggaggacacaacaggtagagccgggggtgcccggccgcgcgccccccgcgcatcatgcagctctttgtcacctctctcgcccccaggccaaaatcctgagcatgatggaagacaataagcagctcgcg

SEQ ID NO: 45 - DNA, 146 bp, Homo sapiens
cgcgccctccctgtcccgcggcccgcaggcccagccctcaagcgcccagcctccgcggcctttgtggcgtcacagccagcctgaagaatggttgccttggagacgtaaacccaagagccctgctcctggagctgagaactgcagcg

SEQ ID NO: 46 - DNA, 179 bp, Homo sapiens
cgggccgccgcctctgctgctgggcagcgcctccgacatgaaggctgagctgtcgcaacttattagcgacctgggcgagctcagcttcggcaacgacgtgcgcaccctgcaggccgacttgcgggtgacgcgcctgctgtcaggcgacagcacgggcagcgagagctccatcgagggcg

SEQ ID NO: 47 - DNA, 152 bp, Homo sapiens
cgtcccctcctcccccgctccttcccctccttcccctgctcccgcgccgcctcgcgtctcccgcccgctgtagccggcgaggagcgccgcacgttggccccggcgcgaggagctcccgggttcccgggcgggcactggagtaaggagctgcg

SEQ ID NO: 48 - DNA, 2 bp, Homo sapiens
cg

SEQ ID NO: 49 - DNA, 2 bp, Homo sapiens
cg

SEQ ID NO: 50 - DNA, 2 bp, Homo sapiens
cg

SEQ ID NO: 51 - DNA, 30 bp, Homo sapiens
cgaaaaaccccgcctctccccgaactcccg

SEQ ID NO: 52 - DNA, 2 bp, Homo sapiens
cg

SEQ ID NO: 53 - DNA, 106 bp, Homo sapiens
cgcaccgtgtagccgctgggctcgttctccaggtagtagggcacctgctggccgtggggctgcaggaaaggcgacagctgcggcggcgggtgcagtagcatcagcg

SEQ ID NO: 54 - DNA, 125 bp, Homo sapiens
cgcccacggtgcggagggctggtgggctttccttggccgtcgggcccgccacggcgcgggtcttggctgcggggcggaggtggggcgggagagccgaggataagagtttgaggcttttcgaggcg

SEQ ID NO: 55 - DNA, 154 bp, Homo sapiens
cgcggcgtgggcctgctctcgggagggctcggcgaggaccaccgagtccgcgcagcccccgccgacctctcggaaatgtgaccgccgaagctagaggggccgcagggctcaccccgcagccctccgcaacgcgccaacttggacgccagcggcg

SEQ ID NO: 56 - DNA, 2 bp, Homo sapiens
cg

SEQ ID NO: 57 - DNA, 204 bp, Homo sapiens
cgcctggcgcctgcccgggggatgctcaggcgcgggtacccatcgtccggccgggggcgtcctgggctgctggctgcagtgtgaagatccagcagcagccgccgccaccgccgctgctttgtggggagagtggcggggagtccttgggagcgccaaagcgctgcccccgctgcagtcgggagagggcggaggaggagacgggcg

SEQ ID NO: 58 - DNA, 2 bp, Homo sapiens
cg

SEQ ID NO: 59 - DNA, 2 bp, Homo sapiens
cg

SEQ ID NO: 60 - DNA, 151 bp, Homo sapiens
cggggacctacttccttttctgtcccaagaggactcaaaggaaaacaattcacttgatcctggatacgttttcatctataattcggaaatatgcaaatgaaaggcccacatggtctgaaaggggcaaatcaagctcccagcgtgcggcgcg

SEQ ID NO: 61 - DNA, 72 bp, Homo sapiens
cggggaaagcagcgtgaggcagtgagccgaggggcggggccaggaggacgccccgcccccgagcccgccccg

SEQ ID NO: 62 - DNA, 82 bp, Homo sapiens
cgcaaacggcaggcctggcggttggggccgaggagggagggtaccaccgccccgaggcagcacgcagcctgcagcagaggcg

SEQ ID NO: 63 - DNA, 64 bp, Homo sapiens
cgtagcttcaaacaccctaaacggcgcgcgcatcctccgcctggcccactcaccgactccgccg

SEQ ID NO: 64 - DNA, 6 bp, Homo sapiens
cggacg

SEQ ID NO: 65 - DNA, 110 bp, Homo sapiens
cgcgcgcccatcccaggcgcagagtgaaaagagcttcccgccaccgcccgcgccgccccgctccgcttcgcccttgcgcagctcccgcactcgcacctggaccagggccg

SEQ ID NO: 66 - DNA, 2 bp, Homo sapiens
cg

SEQ ID NO: 67 - DNA, 63 bp, Homo sapiens
cggggctgagccgcccgccccgcatcgcgccgccccgcccagcccgcagcccacagctccccg

SEQ ID NO: 68 - DNA, 6 bp, Homo sapiens
cgcccg

SEQ ID NO: 69 - DNA, 2 bp, Homo sapiens
cg

SEQ ID NO: 70 - DNA, 2 bp, Homo sapiens
cg

SEQ ID NO: 71 - DNA, 2 bp, Homo sapiens
cg

SEQ ID NO: 72 - DNA, 112 bp, Homo sapiens
cgtcgcggagggggcgaagccaggagctggatcgtctctgcctcccgccctgggggtaacagccccgcttccccagcccagacgtccccgagccgctcgcgggcccccagcg

SEQ ID NO: 73 - DNA, 82 bp, Homo sapiens
cgcccctcccagctcacccacggacgagcggatcctcgacctccgcggcagggacatcttaagagctttgtccaggcctgcg

SEQ ID NO: 74 - DNA, 2 bp, Homo sapiens
cg

SEQ ID NO: 75 - DNA, 112 bp, Homo sapiens
cgtgcactgtgcgctgtcctgacttgccaaaaaagaaagcagaaaaacacccaaagcacgttcgagaagagaagggggaaatctggggtctgcccttcctttagaaaagccg

SEQ ID NO: 76 - DNA, 124 bp, Homo sapiens
cgccatccccgcgcaggctctacgccgctccagctgccctccgaggccttcaagaaaacttgggcgccgccctccgaccgcagccccagccagagcttcccgagcgcggggcagccgcgggccg

SEQ ID NO: 77 - DNA, 2 bp, Homo sapiens
cg

SEQ ID NO: 78 - DNA, 156 bp, Homo sapiens
cgcgggccgcgtgggtttgggcgcgccgtggtgggcaagcggggccagcggagcgggaacccgcacaccctccgagcggagccgaggacaggcccgtgcgggccgcggggtccctctggcgccaggaagcggcggccgaaggagacaacgagaacg

SEQ ID NO: 79 - DNA, 48 bp, Homo sapiens
cgggcggggaggcgtcgggtcggggcgcacaggggccaggcgggggcg

SEQ ID NO: 80 - DNA, 63 bp, Homo sapiens
cgaggtggggcggcgcggcaggtgcagggctggggagggcctgacagccctggagagtgcccg

SEQ ID NO: 81 - DNA, 6 bp, Homo sapiens
cgcccg

SEQ ID NO: 82 - DNA, 91 bp, Homo sapiens
cgccagcgcagggcagcctccagctcccgccgccagctcgcggcccctgccgcgaccccgcccactgcgggcccctccgcccgcccccgcg

SEQ ID NO: 83 - DNA, 142 bp, Homo sapiens
cgcggccccagccttgacctgtttgacttgagcgagagggaggaagggcgcgcgggccgcgggcgacgggcgggtgcgcgggcgggcaggggaccttggctaaggcgagagtagcgcacgccagcgccgcctcctagactcg

SEQ ID NO: 84 - DNA, 12 bp, Homo sapiens
cggacctgggcg

SEQ ID NO: 85 - DNA, 52 bp, Homo sapiens
cgaggggagtaataagtgggggcgccctgcactgccaagggcagtgttctcg

SEQ ID NO: 86 - DNA, 2 bp, Homo sapiens
cg

SEQ ID NO: 87 - DNA, 95 bp, Homo sapiens
cgccagggggcgctgaaggcccgcaggttctgcgaccgccctccctcgcagggcgccgccctcgcctcgcccaccctgcctcgcgctaggcgccg

SEQ ID NO: 88 - DNA, 10 bp, Homo sapiens
cgagcggacg

SEQ ID NO: 89 - DNA, 2 bp, Homo sapiens
cg

SEQ ID NO: 90 - DNA, 41 bp, Homo sapiens
cgctgaggacgctgcccaagccaggcgcccgcccccgcccg

SEQ ID NO: 91 - DNA, 2 bp, Homo sapiens
cg

SEQ ID NO: 92 - DNA, 2 bp, Homo sapiens
cg

SEQ ID NO: 93 - DNA, 20 bp, Homo sapiens
cggccgccgacccacgtccg

SEQ ID NO: 94 - DNA, 301 bp, Homo sapiens
cgcgagctgcttattgtcttccatcatgctcaggattttggcctgggggcgagagaggtgacaaagagctgcatgatgcgcggggggcgcgcggccgggcacccccggctctacctgttgtgtcctccgcggcccggcttcgcccgcgccccgacccccaggcaccggcagcgccggttcctccggcacaggaatgacagcggcgcctccagccctagccgcggcggtggcgaggcggcggggggaggaggcggaggagaaaaaagaggaggagaaggaggaggaggagcagcgatcgccg

SEQ ID NO: 95 - DNA, 146 bp, Homo sapiens
cgctgcagttctcagctccaggagcagggctcttgggtttacgtctccaaggcaaccattcttcaggctggctgtgacgccacaaaggccgcggaggctgggcgcttgagggctgggcctgcgggccgcgggacagggagggcgcg

SEQ ID NO: 96 - DNA, 179 bp, Homo sapiens
cgccctcgatggagctctcgctgcccgtgctgtcgcctgacagcaggcgcgtcacccgcaagtcggcctgcagggtgcgcacgtcgttgccgaagctgagctcgcccaggtcgctaataagttgcgacagctcagccttcatgtcggaggcgctgcccagcagcagaggcggcggcccg

SEQ ID NO: 97 - DNA, 152 bp, Homo sapiens
cgcagctccttactccagtgcccgcccgggaacccgggagctcctcgcgccggggccaacgtgcggcgctcctcgccggctacagcgggcgggagacgcgaggcggcgcgggagcaggggaaggaggggaaggagcgggggaggaggggacg

SEQ ID NO: 98 - DNA, 2 bp, Homo sapiens
cg

SEQ ID NO: 99 - DNA, 2 bp, Homo sapiens
cg

SEQ ID NO: 100 - DNA, 2 bp, Homo sapiens
cg

SEQ ID NO: 101 - DNA, 30 bp, Artificial Sequence
  Description of Artificial Sequence: Synthetic oligonucleotide
ygggagttyggggagaggyggggtttttyg

SEQ ID NO: 102 - DNA, 2 bp, Artificial Sequence
  Description of Artificial Sequence: Synthetic oligonucleotide
yg

SEQ ID NO: 103 - DNA, 106 bp, Artificial Sequence
  Description of Artificial Sequence: Synthetic polynucleotide
ygttgatgttattgtattygtygtygtagttgtygttttttttgtagttttayggttagtaggtgttttattatttggagaaygagtttagyggttatayggtgyg

SEQ ID NO: 104 - DNA, 125 bp, Artificial Sequence
  Description of Artificial Sequence: Synthetic polynucleotide
ygtttygaaaagttttaaatttttattttyggttttttygttttattttygtttygtagttaagattygygtygtggygggttygayggttaaggaaagtttattagtttttygtatygtgggyg

SEQ ID NO: 105 - DNA, 154 bp, Artificial Sequence
  Description of Artificial Sequence: Synthetic polynucleotide
ygtygttggygtttaagttggygygttgyggagggttgyggggtgagttttgyggtttttttagtttyggyggttatattttygagaggtyggygggggttgygyggattyggtggttttygtygagttttttygagagtaggtttaygtygyg

SEQ ID NO: 106 - DNA, 2 bp, Artificial Sequence
  Description of Artificial Sequence: Synthetic oligonucleotide
yg

SEQ ID NO: 107 - DNA, 204 bp, Artificial Sequence
  Description of Artificial Sequence: Synthetic polynucleotide
ygttygttttttttttygttttttttygattgtagygggggtagygttttggygtttttaaggatttttygttattttttttataaagtagyggyggtggyggyggttgttgttggatttttatattgtagttagtagtttaggaygttttyggtyggaygatgggtattygygtttgagtatttttygggtaggygttaggyg

SEQ ID NO: 108 - DNA, 2 bp, Artificial Sequence
  Description of Artificial Sequence: Synthetic oligonucleotide
yg

SEQ ID NO: 109 - DNA, 2 bp, Artificial Sequence
  Description of Artificial Sequence: Synthetic oligonucleotide
yg

SEQ ID NO: 110 - DNA, 151 bp, Artificial Sequence
  Description of Artificial Sequence: Synthetic polynucleotide
ygygtygtaygttgggagtttgatttgttttttttagattatgtgggttttttatttgtatattttygaattatagatgaaaaygtatttaggattaagtgaattgtttttttttgagtttttttgggatagaaaaggaagtaggttttyg

SEQ ID NO: 111 - DNA, 72 bp, Artificial Sequence
  Description of Artificial Sequence: Synthetic oligonucleotide
yggggygggttygggggyggggygtttttttggtttygtttttyggtttattgttttaygttgtttttttyg

SEQ ID NO: 112 - DNA, 82 bp, Artificial Sequence
  Description of Artificial Sequence: Synthetic oligonucleotide
ygtttttgttgtaggttgygtgttgtttyggggyggtggtatttttttttttyggttttaatygttaggtttgtygtttgyg

SEQ ID NO: 113 - DNA, 64 bp, Artificial Sequence
  Description of Artificial Sequence: Synthetic oligonucleotide
yggyggagtyggtgagtgggttaggyggaggatgygygygtygtttagggtgtttgaagttayg

SEQ ID NO: 114 - DNA, 6 bp, Artificial Sequence
  Description of Artificial Sequence: Synthetic oligonucleotide
ygttyg

SEQ ID NO: 115 - DNA, 110 bp, Artificial Sequence
  Description of Artificial Sequence: Synthetic polynucleotide
yggttttggtttaggtgygagtgygggagttgygtaagggygaagyggagyggggyggygygggyggtggygggaagttttttttattttgygtttgggatgggygygyg

SEQ ID NO: 116 - DNA, 2 bp, Artificial Sequence
  Description of Artificial Sequence: Synthetic oligonucleotide
yg

SEQ ID NO: 117 - DNA, 63 bp, Artificial Sequence
  Description of Artificial Sequence: Synthetic oligonucleotide
yggggagttgtgggttgygggttgggyggggyggygygatgyggggygggyggtttagtttyg

SEQ ID NO: 118 - DNA, 6 bp, Artificial Sequence
  Description of Artificial Sequence: Synthetic oligonucleotide
ygggyg

SEQ ID NO: 119 - DNA, 2 bp, Artificial Sequence
  Description of Artificial Sequence: Synthetic oligonucleotide
yg

SEQ ID NO: 120 - DNA, 2 bp, Artificial Sequence
  Description of Artificial Sequence: Synthetic oligonucleotide
yg

SEQ ID NO: 121 - DNA, 2 bp, Artificial Sequence
  Description of Artificial Sequence: Synthetic oligonucleotide
yg

SEQ ID NO: 122 - DNA, 112 bp, Artificial Sequence
  Description of Artificial Sequence: Synthetic polynucleotide
ygttgggggttygygagyggttyggggaygtttgggttggggaagyggggttgttatttttagggygggaggtagagaygatttagtttttggtttygtttttttygygayg

SEQ ID NO: 123 - DNA, 82 bp, Artificial Sequence
  Description of Artificial Sequence: Synthetic oligonucleotide
ygtaggtttggataaagtttttaagatgtttttgtygyggaggtygaggattygttygttygtgggtgagttgggaggggyg

SEQ ID NO: 124 - DNA, 2 bp, Artificial Sequence
  Description of Artificial Sequence: Synthetic oligonucleotide
yg

SEQ ID NO: 125 - DNA, 112 bp, Artificial Sequence
  Description of Artificial Sequence: Synthetic polynucleotide
yggtttttttaaaggaagggtagattttagatttttttttttttttttygaaygtgttttgggtgtttttttgtttttttttttggtaagttaggatagygtatagtgtayg

SEQ ID NO: 126 - DNA, 124 bp, Artificial Sequence
  Description of Artificial Sequence: Synthetic polynucleotide
yggttygyggttgtttygygttygggaagttttggttggggttgyggtyggagggyggygtttaagtttttttgaaggtttyggagggtagttggagyggygtagagtttgygyggggatggyg

SEQ ID NO: 127 - DNA, 2 bp, Artificial Sequence
  Description of Artificial Sequence: Synthetic oligonucleotide
yg

SEQ ID NO: 128 - DNA, 156 bp, Artificial Sequence
  Description of Artificial Sequence: Synthetic polynucleotide
ygttttygttgtttttttyggtygtygttttttggygttagagggatttygyggttygtaygggtttgttttyggtttygttyggagggtgtgygggttttygtttygttggtttygtttgtttattayggygygtttaaatttaygyggttygyg

SEQ ID NO: 129 - DNA, 48 bp, Artificial Sequence
  Description of Artificial Sequence: Synthetic oligonucleotide
ygttttygtttggtttttgtgygtttygattygaygttttttygttyg

SEQ ID NO: 130 - DNA, 63 bp, Artificial Sequence
  Description of Artificial Sequence: Synthetic oligonucleotide
ygggtattttttagggttgttaggttttttttagttttgtatttgtygygtygttttatttyg

SEQ ID NO: 131 - DNA, 6 bp, Artificial Sequence
  Description of Artificial Sequence: Synthetic oligonucleotide
ygggyg

SEQ ID NO: 132 - DNA, 91 bp, Artificial Sequence
  Description of Artificial Sequence: Synthetic oligonucleotide
ygygggggygggyggaggggttygtagtgggyggggtygyggtaggggtygygagttggyggygggagttggaggttgttttgygttggyg

SEQ ID NO: 133 - DNA, 142 bp, Artificial Sequence
  Description of Artificial Sequence: Synthetic polynucleotide
ygagtttaggaggyggygttggygtgygttattttygttttagttaaggttttttgttygttygygtattygttygtygttygyggttygygygttttttttttttttygtttaagttaaataggttaaggttggggtygyg

SEQ ID NO: 134 - DNA, 12 bp, Artificial Sequence
  Description of Artificial Sequence: Synthetic oligonucleotide
ygtttaggttyg

SEQ ID NO: 135 - DNA, 52 bp, Artificial Sequence
  Description of Artificial Sequence: Synthetic oligonucleotide
ygagaatattgtttttggtagtgtagggygtttttatttattatttttttyg

SEQ ID NO: 136 - DNA, 2 bp, Artificial Sequence
  Description of Artificial Sequence: Synthetic oligonucleotide
yg

SEQ ID NO: 137 - DNA, 95 bp, Artificial Sequence
  Description of Artificial Sequence: Synthetic oligonucleotide
yggygtttagygygaggtagggtgggygaggygagggyggygttttgygagggagggyggtygtagaatttgygggtttttagygttttttggyg

SEQ ID NO: 138 - DNA, 10 bp, Artificial Sequence
  Description of Artificial Sequence: Synthetic oligonucleotide
ygttygttyg

SEQ ID NO: 139 - DNA, 2 bp, Artificial Sequence
  Description of Artificial Sequence: Synthetic oligonucleotide
yg

SEQ ID NO: 140 - DNA, 41 bp, Artificial Sequence
  Description of Artificial Sequence: Synthetic oligonucleotide
ygggygggggygggygtttggtttgggtagygtttttagyg

SEQ ID NO: 141 - DNA, 2 bp, Artificial Sequence
  Description of Artificial Sequence: Synthetic oligonucleotide
yg

SEQ ID NO: 142 - DNA, 2 bp, Artificial Sequence
  Description of Artificial Sequence: Synthetic oligonucleotide
yg

SEQ ID NO: 143 - DNA, 20 bp, Artificial Sequence
  Description of Artificial Sequence: Synthetic oligonucleotide
yggaygtgggtyggyggtyg

SEQ ID NO: 144 - DNA, 301 bp, Artificial Sequence
  Description of Artificial Sequence: Synthetic polynucleotide
yggygatygttgttttttttttttttttttttttttttttttttttttygtttttttttttygtygtttygttatygtygyggttagggttggaggygtygttgttatttttgtgtyggaggaatyggygttgtyggtgtttgggggtyggggygygggygaagtygggtygyggaggatataataggtagagtygggggtgttyggtygygygtttttygygtattatgtagttttttgttatttttttygtttttaggttaaaattttgagtatgatggaagataataagtagttygyg

SEQ ID NO: 145 - DNA, 146 bp, Artificial Sequence
  Description of Artificial Sequence: Synthetic polynucleotide
ygygttttttttgtttygyggttygtaggtttagtttttaagygtttagttttygyggtttttgtggygttatagttagtttgaagaatggttgttttggagaygtaaatttaagagttttgtttttggagttgagaattgtagyg

SEQ ID NO: 146 - DNA, 179 bp, Artificial Sequence
  Description of Artificial Sequence: Synthetic polynucleotide
ygggtygtygtttttgttgttgggtagygttttygatatgaaggttgagttgtygtaatttattagygatttgggygagtttagtttyggtaaygaygtgygtattttgtaggtygatttgygggtgaygygtttgttgttaggygatagtaygggtagygagagttttatygagggyg

SEQ ID NO: 147 - DNA, 152 bp, Artificial Sequence
  Description of Artificial Sequence: Synthetic polynucleotide
ygtttttttttttttygttttttttttttttttttttgttttygygtygtttygygtttttygttygttgtagtyggygaggagygtygtaygttggtttyggygygaggagttttygggttttygggygggtattggagtaaggagttgyg

SEQ ID NO: 148 - DNA, 2 bp, Artificial Sequence
  Description of Artificial Sequence: Synthetic oligonucleotide
yg

SEQ ID NO: 149 - DNA, 2 bp, Artificial Sequence
  Description of Artificial Sequence: Synthetic oligonucleotide
yg

SEQ ID NO: 150 - DNA, 2 bp, Artificial Sequence
  Description of Artificial Sequence: Synthetic oligonucleotide
yg

SEQ ID NO: 151 - DNA, 30 bp, Artificial Sequence
  Description of Artificial Sequence: Synthetic oligonucleotide
ygaaaaatttygttttttttygaattttyg

SEQ ID NO: 152 - DNA, 2 bp, Artificial Sequence
  Description of Artificial Sequence: Synthetic oligonucleotide
yg

SEQ ID NO: 153 - DNA, 106 bp, Artificial Sequence
  Description of Artificial Sequence: Synthetic polynucleotide
ygtatygtgtagtygttgggttygttttttaggtagtagggtatttgttggtygtggggttgtaggaaaggygatagttgyggyggygggtgtagtagtattagyg

SEQ ID NO: 154 - DNA, 125 bp, Artificial Sequence
  Description of Artificial Sequence: Synthetic polynucleotide
ygtttayggtgyggagggttggtgggttttttttggtygtygggttygttayggygygggttttggttgyggggyggaggtggggygggagagtygaggataagagtttgaggtttttygaggyg

SEQ ID NO: 155 - DNA, 154 bp, Artificial Sequence
  Description of Artificial Sequence: Synthetic polynucleotide
ygyggygtgggtttgttttygggagggttyggygaggattatygagttygygtagttttygtygatttttyggaaatgtgatygtygaagttagaggggtygtagggtttatttygtagtttttygtaaygygttaatttggaygttagyggyg

SEQ ID NO: 156 - DNA, 2 bp, Artificial Sequence
  Description of Artificial Sequence: Synthetic oligonucleotide
yg

SEQ ID NO: 157 - DNA, 204 bp, Artificial Sequence
  Description of Artificial Sequence: Synthetic polynucleotide
ygtttggygtttgttygggggatgtttaggygygggtatttatygttyggtygggggygttttgggttgttggttgtagtgtgaagatttagtagtagtygtygttatygtygttgttttgtggggagagtggyggggagtttttgggagygttaaagygttgttttygttgtagtygggagagggyggaggaggagaygggyg

SEQ ID NO: 158 - DNA, 2 bp, Artificial Sequence
  Description of Artificial Sequence: Synthetic oligonucleotide
yg

SEQ ID NO: 159 - DNA, 2 bp, Artificial Sequence
  Description of Artificial Sequence: Synthetic oligonucleotide
yg

SEQ ID NO: 160 - DNA, 151 bp, Artificial Sequence
  Description of Artificial Sequence: Synthetic polynucleotide
yggggatttatttttttttttgttttaagaggatttaaaggaaaataatttatttgattttggataygtttttatttataattyggaaatatgtaaatgaaaggtttatatggtttgaaaggggtaaattaagtttttagygtgyggygyg

SEQ ID NO: 161 - DNA, 72 bp, Artificial Sequence
  Description of Artificial Sequence: Synthetic oligonucleotide
yggggaaagtagygtgaggtagtgagtygaggggyggggttaggaggaygtttygttttygagttygtttyg

SEQ ID NO: 162 - DNA, 82 bp, Artificial Sequence
  Description of Artificial Sequence: Synthetic oligonucleotide
ygtaaayggtaggtttggyggttggggtygaggagggagggtattatygtttygaggtagtaygtagtttgtagtagaggyg

SEQ ID NO: 163 - DNA, 64 bp, Artificial Sequence
  Description of Artificial Sequence: Synthetic oligonucleotide
ygtagttttaaatattttaaayggygygygtatttttygtttggtttatttatygatttygtyg

SEQ ID NO: 164 - DNA, 6 bp, Artificial Sequence
  Description of Artificial Sequence: Synthetic oligonucleotide
yggayg

SEQ ID NO: 165 - DNA, 110 bp, Artificial Sequence
  Description of Artificial Sequence: Synthetic polynucleotide
ygygygtttattttaggygtagagtgaaaagagtttttygttatygttygygtygtttygtttygtttygtttttgygtagttttygtattygtatttggattagggtyg

SEQ ID NO: 166 - DNA, 2 bp, Artificial Sequence
  Description of Artificial Sequence: Synthetic oligonucleotide
yg

SEQ ID NO: 167 - DNA, 63 bp, Artificial Sequence
  Description of Artificial Sequence: Synthetic oligonucleotide
yggggttgagtygttygtttygtatygygtygtttygtttagttygtagtttatagtttttyg

SEQ ID NO: 168 - DNA, 6 bp, Artificial Sequence
  Description of Artificial Sequence: Synthetic oligonucleotide
ygttyg

SEQ ID NO: 169 - DNA, 2 bp, Artificial Sequence
  Description of Artificial Sequence: Synthetic oligonucleotide
yg

SEQ ID NO: 170 - DNA, 2 bp, Artificial Sequence
  Description of Artificial Sequence: Synthetic oligonucleotide
yg

SEQ ID NO: 171 - DNA, 2 bp, Artificial Sequence
  Description of Artificial Sequence: Synthetic oligonucleotide
yg

SEQ ID NO: 172 - DNA, 112 bp, Artificial Sequence
  Description of Artificial Sequence: Synthetic polynucleotide
ygtygyggagggggygaagttaggagttggatygtttttgtttttygttttgggggtaatagtttygtttttttagtttagaygttttygagtygttygygggtttttagyg

SEQ ID NO: 173 - DNA, 82 bp, Artificial Sequence
  Description of Artificial Sequence: Synthetic oligonucleotide
ygttttttttagtttatttayggaygagyggattttygattttygyggtagggatattttaagagttttgtttaggtttgyg

SEQ ID NO: 174 - DNA, 2 bp, Artificial Sequence
  Description of Artificial Sequence: Synthetic oligonucleotide
yg

SEQ ID NO: 175 - DNA, 112 bp, Artificial Sequence
  Description of Artificial Sequence: Synthetic polynucleotide
ygtgtattgtgygttgttttgatttgttaaaaaagaaagtagaaaaatatttaaagtaygttygagaagagaagggggaaatttggggtttgttttttttttagaaaagtyg

SEQ ID NO: 176 - DNA, 124 bp, Artificial Sequence
  Description of Artificial Sequence: Synthetic polynucleotide
ygttattttygygtaggttttaygtygttttagttgtttttygaggtttttaagaaaatttgggygtygtttttygatygtagttttagttagagtttttygagygyggggtagtygygggtyg

SEQ ID NO: 177 - DNA, 2 bp, Artificial Sequence
  Description of Artificial Sequence: Synthetic oligonucleotide
yg

SEQ ID NO: 178 - DNA, 156 bp, Artificial Sequence
  Description of Artificial Sequence: Synthetic polynucleotide
ygygggtygygtgggtttgggygygtygtggtgggtaagyggggttagyggagygggaattygtatatttttygagyggagtygaggataggttygtgygggtygyggggtttttttggygttaggaagyggyggtygaaggagataaygagaayg

SEQ ID NO: 179 - DNA, 48 bp, Artificial Sequence
  Description of Artificial Sequence: Synthetic oligonucleotide
ygggyggggaggygtygggtyggggygtataggggttaggygggggyg

SEQ ID NO: 180 - DNA, 63 bp, Artificial Sequence
  Description of Artificial Sequence: Synthetic oligonucleotide
ygaggtggggyggygyggtaggtgtagggttggggagggtttgatagttttggagagtgttyg

SEQ ID NO: 181 - DNA, 6 bp, Artificial Sequence
  Description of Artificial Sequence: Synthetic oligonucleotide
ygttyg

SEQ ID NO: 182 - DNA, 91 bp, Artificial Sequence
  Description of Artificial Sequence: Synthetic oligonucleotide
ygttagygtagggtagtttttagttttygtygttagttygyggtttttgtygygatttygtttattgygggttttttygttygttttygyg

SEQ ID NO: 183 - DNA, 142 bp, Artificial Sequence
  Description of Artificial Sequence: Synthetic polynucleotide
ygyggttttagttttgatttgtttgatttgagygagagggaggaagggygygygggtygygggygaygggygggtgygygggygggtaggggattttggttaaggygagagtagygtaygttagygtygttttttagattyg

SEQ ID NO: 184 - DNA, 12 bp, Artificial Sequence
  Description of Artificial Sequence: Synthetic oligonucleotide
yggatttgggyg

SEQ ID NO: 185 - DNA, 52 bp, Artificial Sequence
  Description of Artificial Sequence: Synthetic oligonucleotide
ygaggggagtaataagtgggggygttttgtattgttaagggtagtgttttyg

SEQ ID NO: 186 - DNA, 2 bp, Artificial Sequence
  Description of Artificial Sequence: Synthetic oligonucleotide
yg

SEQ ID NO: 187 - DNA, 95 bp, Artificial Sequence
  Description of Artificial Sequence: Synthetic oligonucleotide
ygttagggggygttgaaggttygtaggttttgygatygttttttttygtagggygtygttttygtttygtttattttgtttygygttaggygtyg

SEQ ID NO: 188 - DNA, 10 bp, Artificial Sequence
  Description of Artificial Sequence: Synthetic oligonucleotide
ygagyggayg

SEQ ID NO: 189 - DNA, 2 bp, Artificial Sequence
  Description of Artificial Sequence: Synthetic oligonucleotide
yg

SEQ ID NO: 190 - DNA, 41 bp, Artificial Sequence
  Description of Artificial Sequence: Synthetic oligonucleotide
ygttgaggaygttgtttaagttaggygttygttttygttyg

SEQ ID NO: 191 - DNA, 2 bp, Artificial Sequence
  Description of Artificial Sequence: Synthetic oligonucleotide
yg

SEQ ID NO: 192 - DNA, 2 bp, Artificial Sequence
  Description of Artificial Sequence: Synthetic oligonucleotide
yg

SEQ ID NO: 193 - DNA, 20 bp, Artificial Sequence
  Description of Artificial Sequence: Synthetic oligonucleotide
yggtygtygatttaygttyg

SEQ ID NO: 194 - DNA, 301 bp, Artificial Sequence
  Description of Artificial Sequence: Synthetic polynucleotide
ygygagttgtttattgttttttattatgtttaggattttggtttgggggygagagaggtgataaagagttgtatgatgygyggggggygygyggtygggtattttyggttttatttgttgtgtttttygyggttyggtttygttygygtttygatttttaggtatyggtagygtyggttttttyggtataggaatgatagyggygtttttagttttagtygyggyggtggygaggyggyggggggaggaggyggaggagaaaaaagaggaggagaaggaggaggaggagtagygatygtyg

SEQ ID NO: 195 - DNA, 146 bp, Artificial Sequence
  Description of Artificial Sequence: Synthetic polynucleotide
ygttgtagtttttagttttaggagtagggtttttgggtttaygtttttaaggtaattattttttaggttggttgtgaygttataaaggtygyggaggttgggygtttgagggttgggtttgygggtygygggatagggagggygyg

SEQ ID NO: 196 - DNA, 179 bp, Artificial Sequence
  Description of Artificial Sequence: Synthetic polynucleotide
ygttttygatggagttttygttgttygtgttgtygtttgatagtaggygygttattygtaagtyggtttgtagggtgygtaygtygttgtygaagttgagttygtttaggtygttaataagttgygatagtttagtttttatgtyggaggygttgtttagtagtagaggyggyggttyg

SEQ ID NO: 197 - DNA, 152 bp, Artificial Sequence
  Description of Artificial Sequence: Synthetic polynucleotide
ygtagttttttattttagtgttygttygggaattygggagtttttygygtyggggttaaygtgyggygtttttygtyggttatagygggygggagaygygaggyggygygggagtaggggaaggaggggaaggagygggggaggaggggayg

SEQ ID NO: 198 - DNA, 2 bp, Artificial Sequence
  Description of Artificial Sequence: Synthetic oligonucleotide
yg

SEQ ID NO: 199 - DNA, 2 bp, Artificial Sequence
  Description of Artificial Sequence: Synthetic oligonucleotide
yg

SEQ ID NO: 200 - DNA, 2 bp, Artificial Sequence
  Description of Artificial Sequence: Synthetic oligonucleotide
yg

SEQ ID NO: 201 - DNA, 30 bp, Artificial Sequence; identical to SEQ ID NO: 1
  Description of Artificial Sequence: Synthetic oligonucleotide

SEQ ID NO: 202 - DNA, 2 bp, Artificial Sequence
  Description of Artificial Sequence: Synthetic oligonucleotide
cg

SEQ ID NO: 203 - DNA, 106 bp, Artificial Sequence
  Description of Artificial Sequence: Synthetic polynucleotide
cgttgatgttattgtattcgtcgtcgtagttgtcgttttttttgtagttttacggttagtaggtgttttattatttggagaacgagtttagcggttatacggtgcg

SEQ ID NO: 204 - DNA, 125 bp, Artificial Sequence
  Description of Artificial Sequence: Synthetic polynucleotide
cgtttcgaaaagttttaaatttttattttcggttttttcgttttattttcgtttcgtagttaagattcgcgtcgtggcgggttcgacggttaaggaaagtttattagtttttcgtatcgtgggcg

SEQ ID NO: 205 - DNA, 154 bp, Artificial Sequence
  Description of Artificial Sequence: Synthetic polynucleotide
cgtcgttggcgtttaagttggcgcgttgcggagggttgcggggtgagttttgcggtttttttagtttcggcggttatattttcgagaggtcggcgggggttgcgcggattcggtggttttcgtcgagttttttcgagagtaggtttacgtcgcg

SEQ ID NO: 206 - DNA, 2 bp, Artificial Sequence
  Description of Artificial Sequence: Synthetic oligonucleotide
cg

SEQ ID NO: 207 - DNA, 204 bp, Artificial Sequence
  Description of Artificial Sequence: Synthetic polynucleotide
cgttcgttttttttttcgttttttttcgattgtagcgggggtagcgttttggcgtttttaaggatttttcgttattttttttataaagtagcggcggtggcggcggttgttgttggatttttatattgtagttagtagtttaggacgttttcggtcggacgatgggtattcgcgtttgagtatttttcgggtaggcgttaggcg

SEQ ID NO: 208 - DNA, 2 bp, Artificial Sequence
  Description of Artificial Sequence: Synthetic oligonucleotide
cg

SEQ ID NO: 209 - DNA, 2 bp, Artificial Sequence
  Description of Artificial Sequence: Synthetic oligonucleotide
cg

SEQ ID NO: 210 - DNA, 151 bp, Artificial Sequence
  Description of Artificial Sequence: Synthetic polynucleotide
cgcgtcgtacgttgggagtttgatttgttttttttagattatgtgggttttttatttgtatattttcgaattatagatgaaaacgtatttaggattaagtgaattgtttttttttgagtttttttgggatagaaaaggaagtaggttttcg

SEQ ID NO: 211 - DNA, 72 bp, Artificial Sequence
  Description of Artificial Sequence: Synthetic oligonucleotide
cggggcgggttcgggggcggggcgtttttttggtttcgtttttcggtttattgttttacgttgtttttttcg

SEQ ID NO: 212 - DNA, 82 bp, Artificial Sequence
  Description of Artificial Sequence: Synthetic oligonucleotide
cgtttttgttgtaggttgcgtgttgtttcggggcggtggtatttttttttttcggttttaatcgttaggtttgtcgtttgcg

SEQ ID NO: 213 - DNA, 64 bp, Artificial Sequence
  Description of Artificial Sequence: Synthetic oligonucleotide
cggcggagtcggtgagtgggttaggcggaggatgcgcgcgtcgtttagggtgtttgaagttacg

SEQ ID NO: 214 - DNA, 6 bp, Artificial Sequence
  Description of Artificial Sequence: Synthetic oligonucleotide
cgttcg

SEQ ID NO: 215 - DNA, 110 bp, Artificial Sequence
  Description of Artificial Sequence: Synthetic polynucleotide
cggttttggtttaggtgcgagtgcgggagttgcgtaagggcgaagcggagcggggcggcgcgggcggtggcgggaagttttttttattttgcgtttgggatgggcgcgcg

SEQ ID NO: 216 - DNA, 2 bp, Artificial Sequence
  Description of Artificial Sequence: Synthetic oligonucleotide
cg

SEQ ID NO: 217 - DNA, 63 bp, Artificial Sequence
  Description of Artificial Sequence: Synthetic oligonucleotide
cggggagttgtgggttgcgggttgggcggggcggcgcgatgcggggcgggcggtttagtttcg

SEQ ID NO: 218 - DNA, 6 bp, Artificial Sequence
  Description of Artificial Sequence: Synthetic oligonucleotide
cgggcg

SEQ ID NO: 219 - DNA, 2 bp, Artificial Sequence
  Description of Artificial Sequence: Synthetic oligonucleotide
cg

SEQ ID NO: 220 - DNA, 2 bp, Artificial Sequence
  Description of Artificial Sequence: Synthetic oligonucleotide
cg

SEQ ID NO: 221 - DNA, 2 bp, Artificial Sequence
  Description of Artificial Sequence: Synthetic oligonucleotide
cg

SEQ ID NO: 222 - DNA, 112 bp, Artificial Sequence
  Description of Artificial Sequence: Synthetic polynucleotide
cgttgggggttcgcgagcggttcggggacgtttgggttggggaagcggggttgttatttttagggcgggaggtagagacgatttagtttttggtttcgtttttttcgcgacg

SEQ ID NO: 223 - DNA, 82 bp, Artificial Sequence
  Description of Artificial Sequence: Synthetic oligonucleotide
cgtaggtttggataaagtttttaagatgtttttgtcgcggaggtcgaggattcgttcgttcgtgggtgagttgggaggggcg

SEQ ID NO: 224 - DNA, 2 bp, Artificial Sequence
  Description of Artificial Sequence: Synthetic oligonucleotide
cg

SEQ ID NO: 225 - DNA, 112 bp, Artificial Sequence
  Description of Artificial Sequence: Synthetic polynucleotide
cggtttttttaaaggaagggtagattttagatttttttttttttttttcgaacgtgttttgggtgtttttttgtttttttttttggtaagttaggatagcgtatagtgtacg

SEQ ID NO: 226 - DNA, 124 bp, Artificial Sequence
  Description of Artificial Sequence: Synthetic polynucleotide
cggttcgcggttgtttcgcgttcgggaagttttggttggggttgcggtcggagggcggcgtttaagtttttttgaaggtttcggagggtagttggagcggcgtagagtttgcgcggggatggcg

SEQ ID NO: 227 - DNA, 2 bp, Artificial Sequence
  Description of Artificial Sequence: Synthetic oligonucleotide
cg

SEQ ID NO: 228 - DNA, 156 bp, Artificial Sequence
  Description of Artificial Sequence: Synthetic polynucleotide
cgttttcgttgtttttttcggtcgtcgttttttggcgttagagggatttcgcggttcgtacgggtttgttttcggtttcgttcggagggtgtgcgggttttcgtttcgttggtttcgtttgtttattacggcgcgtttaaatttacgcggttcgcg

SEQ ID NO: 229 - DNA, 48 bp, Artificial Sequence
  Description of Artificial Sequence: Synthetic oligonucleotide
cgttttcgtttggtttttgtgcgtttcgattcgacgttttttcgttcg

SEQ ID NO: 230 - DNA, 63 bp, Artificial Sequence
  Description of Artificial Sequence: Synthetic oligonucleotide
cgggtattttttagggttgttaggttttttttagttttgtatttgtcgcgtcgttttatttcg

SEQ ID NO: 231 - DNA, 6 bp, Artificial Sequence
  Description of Artificial Sequence: Synthetic oligonucleotide
cgggcg

SEQ ID NO: 232 - DNA, 91 bp, Artificial Sequence
  Description of Artificial Sequence: Synthetic oligonucleotide
cgcgggggcgggcggaggggttcgtagtgggcggggtcgcggtaggggtcgcgagttggcggcgggagttggaggttgttttgcgttggcg

SEQ ID NO: 233 - DNA, 142 bp, Artificial Sequence
  Description of Artificial Sequence: Synthetic polynucleotide
cgagtttaggaggcggcgttggcgtgcgttattttcgttttagttaaggttttttgttcgttcgcgtattcgttcgtcgttcgcggttcgcgcgttttttttttttttcgtttaagttaaataggttaaggttggggtcgcg

SEQ ID NO: 234 - DNA, 12 bp, Artificial Sequence
  Description of Artificial Sequence: Synthetic oligonucleotide
cgtttaggttcg

SEQ ID NO: 235 - DNA, 52 bp, Artificial Sequence
  Description of Artificial Sequence: Synthetic oligonucleotide
cgagaatattgtttttggtagtgtagggcgtttttatttattatttttttcg

SEQ ID NO: 236 - DNA, 2 bp, Artificial Sequence
  Description of Artificial Sequence: Synthetic oligonucleotide
cg

SEQ ID NO: 237 - DNA, 95 bp, Artificial Sequence
  Description of Artificial Sequence: Synthetic oligonucleotide
cggcgtttagcgcgaggtagggtgggcgaggcgagggcggcgttttgcgagggagggcggtcgtagaatttgcgggtttttagcgttttttggcg

SEQ ID NO: 238 - DNA, 10 bp, Artificial Sequence
  Description of Artificial Sequence: Synthetic oligonucleotide
cgttcgttcg

SEQ ID NO: 239 - DNA, 2 bp, Artificial Sequence
  Description of Artificial Sequence: Synthetic oligonucleotide
cg

SEQ ID NO: 240 - DNA, 41 bp, Artificial Sequence
  Description of Artificial Sequence: Synthetic oligonucleotide
cgggcgggggcgggcgtttggtttgggtagcgtttttagcg

SEQ ID NO: 241 - DNA, 2 bp, Artificial Sequence
  Description of Artificial Sequence: Synthetic oligonucleotide
cg

SEQ ID NO: 242 - DNA, 2 bp, Artificial Sequence
  Description of Artificial Sequence: Synthetic oligonucleotide
cg

SEQ ID NO: 243 - DNA, 20 bp, Artificial Sequence
  Description of Artificial Sequence: Synthetic oligonucleotide
cggacgtgggtcggcggtcg

SEQ ID NO: 244 - DNA, 301 bp, Artificial Sequence
  Description of Artificial Sequence: Synthetic polynucleotide
cggcgatcgttgttttttttttttttttttttttttttttttttttttcgtttttttttttcgtcgtttcgttatcgtcgcggttagggttggaggcgtcgttgttatttttgtgtcggaggaatcggcgttgtcggtgtttgggggtcggggcgcgggcgaagtcgggtcgcggaggatataataggtagagtcgggggtgttcggtcgcgcgtttttcgcgtattatgtagttttttgttatttttttcgtttttaggttaaaattttgagtatgatggaagataataagtagttcgcg

SEQ ID NO: 245 - DNA, 146 bp, Artificial Sequence
  Description of Artificial Sequence: Synthetic polynucleotide
cgcgttttttttgtttcgcggttcgtaggtttagtttttaagcgtttagttttcgcggtttttgtggcgttatagttagtttgaagaatggttgttttggagacgtaaatttaagagttttgtttttggagttgagaattgtagcg

SEQ ID NO: 246 - DNA, 179 bp, Artificial Sequence
  Description of Artificial Sequence: Synthetic polynucleotide
cgggtcgtcgtttttgttgttgggtagcgttttcgatatgaaggttgagttgtcgtaatttattagcgatttgggcgagtttagtttcggtaacgacgtgcgtattttgtaggtcgatttgcgggtgacgcgtttgttgttaggcgatagtacgggtagcgagagttttatcgagggcg

SEQ ID NO: 247 - DNA, 152 bp, Artificial Sequence
  Description of Artificial Sequence: Synthetic polynucleotide
cgtttttttttttttcgttttttttttttttttttttgttttcgcgtcgtttcgcgtttttcgttcgttgtagtcggcgaggagcgtcgtacgttggtttcggcgcgaggagttttcgggttttcgggcgggtattggagtaaggagttgcg

SEQ ID NO: 248 - DNA, 2 bp, Artificial Sequence
  Description of Artificial Sequence: Synthetic oligonucleotide
cg

SEQ ID NO: 249 - DNA, 2 bp, Artificial Sequence
  Description of Artificial Sequence: Synthetic oligonucleotide
cg

SEQ ID NO: 250 - DNA, 2 bp, Artificial Sequence
  Description of Artificial Sequence: Synthetic oligonucleotide
cg

SEQ ID NO: 251 - DNA, 30 bp, Artificial Sequence
  Description of Artificial Sequence: Synthetic oligonucleotide
cgaaaaatttcgttttttttcgaattttcg

SEQ ID NO: 252 - DNA, 2 bp, Artificial Sequence
  Description of Artificial Sequence: Synthetic oligonucleotide
cg

SEQ ID NO: 253 - DNA, 106 bp, Artificial Sequence
  Description of Artificial Sequence: Synthetic polynucleotide
cgtatcgtgtagtcgttgggttcgttttttaggtagtagggtatttgttggtcgtggggttgtaggaaaggcgatagttgcggcggcgggtgtagtagtattagcg

SEQ ID NO: 254 - DNA, 125 bp, Artificial Sequence
  Description of Artificial Sequence: Synthetic polynucleotide
cgtttacggtgcggagggttggtgggttttttttggtcgtcgggttcgttacggcgcgggttttggttgcggggcggaggtggggcgggagagtcgaggataagagtttgaggtttttcgaggcg

SEQ ID NO: 255 - DNA, 154 bp, Artificial Sequence
  Description of Artificial Sequence: Synthetic polynucleotide
cgcggcgtgggtttgttttcgggagggttcggcgaggattatcgagttcgcgtagttttcgtcgatttttcggaaatgtgatcgtcgaagttagaggggtcgtagggtttatttcgtagtttttcgtaacgcgttaatttggacgttagcggcg

SEQ ID NO: 256 - DNA, 2 bp, Artificial Sequence
  Description of Artificial Sequence: Synthetic oligonucleotide
cg

SEQ ID NO: 257 - DNA, 204 bp, Artificial Sequence
  Description of Artificial Sequence: Synthetic polynucleotide
cgtttggcgtttgttcgggggatgtttaggcgcgggtatttatcgttcggtcgggggcgttttgggttgttggttgtagtgtgaagatttagtagtagtcgtcgttatcgtcgttgttttgtggggagagtggcggggagtttttgggagcgttaaagcgttgttttcgttgtagtcgggagagggcggaggaggagacgggcg

SEQ ID NO: 258 - DNA, 2 bp, Artificial Sequence
  Description of Artificial Sequence: Synthetic oligonucleotide
cg

SEQ ID NO: 259 - DNA, 2 bp, Artificial Sequence
  Description of Artificial Sequence: Synthetic oligonucleotide
cg

SEQ ID NO: 260 - DNA, 151 bp, Artificial Sequence
  Description of Artificial Sequence: Synthetic polynucleotide
cggggatttatttttttttttgttttaagaggatttaaaggaaaataatttatttgattttggatacgtttttatttataattcggaaatatgtaaatgaaaggtttatatggtttgaaaggggtaaattaagtttttagcgtgcggcgcg

SEQ ID NO: 261 - DNA, 72 bp, Artificial Sequence
  Description of Artificial Sequence: Synthetic oligonucleotide
cggggaaagtagcgtgaggtagtgagtcgaggggcggggttaggaggacgtttcgttttcgagttcgtttcg

SEQ ID NO: 262 - DNA, 82 bp, Artificial Sequence
  Description of Artificial Sequence: Synthetic oligonucleotide
cgtaaacggtaggtttggcggttggggtcgaggagggagggtattatcgtttcgaggtagtacgtagtttgtagtagaggcg

SEQ ID NO: 263 - DNA, 64 bp, Artificial Sequence
  Description of Artificial Sequence: Synthetic oligonucleotide
cgtagttttaaatattttaaacggcgcgcgtatttttcgtttggtttatttatcgatttcgtcg

SEQ ID NO: 264 - DNA, 6 bp, Artificial Sequence
  Description of Artificial Sequence: Synthetic oligonucleotide
cggacg

SEQ ID NO: 265 - DNA, 110 bp, Artificial Sequence
  Description of Artificial Sequence: Synthetic polynucleotide
cgcgcgtttattttaggcgtagagtgaaaagagtttttcgttatcgttcgcgtcgtttcgtttcgtttcgtttttgcgtagttttcgtattcgtatttggattagggtcg

SEQ ID NO: 266 - DNA, 2 bp, Artificial Sequence
  Description of Artificial Sequence: Synthetic oligonucleotide
cg

SEQ ID NO: 267 - DNA, 63 bp, Artificial Sequence
  Description of Artificial Sequence: Synthetic oligonucleotide
cggggttgagtcgttcgtttcgtatcgcgtcgtttcgtttagttcgtagtttatagtttttcg

SEQ ID NO: 268 - DNA, 6 bp, Artificial Sequence
  Description of Artificial Sequence: Synthetic oligonucleotide
cgttcg

SEQ ID NO: 269 - DNA, 2 bp, Artificial Sequence
  Description of Artificial Sequence: Synthetic oligonucleotide
cg

SEQ ID NO: 270 - DNA, 2 bp, Artificial Sequence
  Description of Artificial Sequence: Synthetic oligonucleotide
cg

SEQ ID NO: 271 - DNA, 2 bp, Artificial Sequence
  Description of Artificial Sequence: Synthetic oligonucleotide
cg

SEQ ID NO: 272 - DNA, 112 bp, Artificial Sequence
  Description of Artificial Sequence: Synthetic polynucleotide
cgtcgcggagggggcgaagttaggagttggatcgtttttgtttttcgttttgggggtaatagtttcgtttttttagtttagacgttttcgagtcgttcgcgggtttttagcg

SEQ ID NO: 273 - DNA, 82 bp, Artificial Sequence
  Description of Artificial Sequence: Synthetic oligonucleotide
cgttttttttagtttatttacggacgagcggattttcgattttcgcggtagggatattttaagagttttgtttaggtttgcg

SEQ ID NO: 274 - DNA, 2 bp, Artificial Sequence
  Description of Artificial Sequence: Synthetic oligonucleotide
cg

SEQ ID NO: 275 - DNA, 112 bp, Artificial Sequence
  Description of Artificial Sequence: Synthetic polynucleotide
cgtgtattgtgcgttgttttgatttgttaaaaaagaaagtagaaaaatatttaaagtacgttcgagaagagaagggggaaatttggggtttgttttttttttagaaaagtcg

SEQ ID NO: 276 - DNA, 124 bp, Artificial Sequence
  Description of Artificial Sequence: Synthetic polynucleotide
cgttattttcgcgtaggttttacgtcgttttagttgtttttcgaggtttttaagaaaatttgggcgtcgtttttcgatcgtagttttagttagagtttttcgagcgcggggtagtcgcgggtcg

SEQ ID NO: 277 - DNA, 2 bp, Artificial Sequence
  Description of Artificial Sequence: Synthetic oligonucleotide
cg

SEQ ID NO: 278 - DNA, 156 bp, Artificial Sequence
  Description of Artificial Sequence: Synthetic polynucleotide
cgcgggtcgcgtgggtttgggcgcgtcgtggtgggtaagcggggttagcggagcgggaattcgtatatttttcgagcggagtcgaggataggttcgtgcgggtcgcggggtttttttggcgttaggaagcggcggtcgaaggagataacgagaacg

SEQ ID NO: 279 - DNA, 48 bp, Artificial Sequence
  Description of Artificial Sequence: Synthetic oligonucleotide
cgggcggggaggcgtcgggtcggggcgtataggggttaggcgggggcg

SEQ ID NO: 280 - DNA, 63 bp, Artificial Sequence
  Description of Artificial Sequence: Synthetic oligonucleotide
cgaggtggggcggcgcggtaggtgtagggttggggagggtttgatagttttggagagtgttcg

SEQ ID NO: 281 - DNA, 6 bp, Artificial Sequence
  Description of Artificial Sequence: Synthetic oligonucleotide
cgttcg

SEQ ID NO: 282 - DNA, 91 bp, Artificial Sequence
  Description of Artificial Sequence: Synthetic oligonucleotide
cgttagcgtagggtagtttttagttttcgtcgttagttcgcggtttttgtcgcgatttcgtttattgcgggttttttcgttcgttttcgcg

SEQ ID NO: 283 - DNA, 142 bp, Artificial Sequence
  Description of Artificial Sequence: Synthetic polynucleotide
cgcggttttagttttgatttgtttgatttgagcgagagggaggaagggcgcgcgggtcgcgggcgacgggcgggtgcgcgggcgggtaggggattttggttaaggcgagagtagcgtacgttagcgtcgttttttagattcg

SEQ ID NO: 284 - DNA, 12 bp, Artificial Sequence
  Description of Artificial Sequence: Synthetic oligonucleotide
cggatttgggcg

SEQ ID NO: 285 - DNA, 52 bp, Artificial Sequence
  Description of Artificial Sequence: Synthetic oligonucleotide
cgaggggagtaataagtgggggcgttttgtattgttaagggtagtgttttcg

SEQ ID NO: 286 - DNA, 2 bp, Artificial Sequence
  Description of Artificial Sequence: Synthetic oligonucleotide
cg

SEQ ID NO: 287 - DNA, 95 bp, Artificial Sequence
  Description of Artificial Sequence: Synthetic oligonucleotide
cgttagggggcgttgaaggttcgtaggttttgcgatcgttttttttcgtagggcgtcgttttcgtttcgtttattttgtttcgcgttaggcgtcg

SEQ ID NO: 288 - DNA, 10 bp, Artificial Sequence
  Description of Artificial Sequence: Synthetic oligonucleotide
cgagcggacg

SEQ ID NO: 289 - DNA, 2 bp, Artificial Sequence
  Description of Artificial Sequence: Synthetic oligonucleotide
cg

SEQ ID NO: 290 - DNA, 41 bp, Artificial Sequence
  Description of Artificial Sequence: Synthetic oligonucleotide
cgttgaggacgttgtttaagttaggcgttcgttttcgttcg

SEQ ID NO: 291 - DNA, 2 bp, Artificial Sequence
  Description of Artificial Sequence: Synthetic oligonucleotide
cg

SEQ ID NO: 292 - DNA, 2 bp, Artificial Sequence
  Description of Artificial Sequence: Synthetic oligonucleotide
cg

SEQ ID NO: 293 - DNA, 20 bp, Artificial Sequence
  Description of Artificial Sequence: Synthetic oligonucleotide
cggtcgtcgatttacgttcg

SEQ ID NO: 294 - DNA, 301 bp, Artificial Sequence
  Description of Artificial Sequence: Synthetic polynucleotide
cgcgagttgtttattgttttttattatgtttaggattttggtttgggggcgagagaggtgataaagagttgtatgatgcgcggggggcgcgcggtcgggtattttcggttttatttgttgtgtttttcgcggttcggtttcgttcgcgtttcgatttttaggtatcggtagcgtcggttttttcggtataggaatgatagcggcgtttttagttttagtcgcggcggtggcgaggcggcggggggaggaggcggaggagaaaaaagaggaggagaaggaggaggaggagtagcgatcgtcg

SEQ ID NO: 295 - DNA, 146 bp, Artificial Sequence
  Description of Artificial Sequence: Synthetic polynucleotide
cgttgtagtttttagttttaggagtagggtttttgggtttacgtttttaaggtaattattttttaggttggttgtgacgttataaaggtcgcggaggttgggcgtttgagggttgggtttgcgggtcgcgggatagggagggcgcg

SEQ ID NO: 296 - DNA, 179 bp, Artificial Sequence
  Description of Artificial Sequence: Synthetic polynucleotide
cgttttcgatggagttttcgttgttcgtgttgtcgtttgatagtaggcgcgttattcgtaagtcggtttgtagggtgcgtacgtcgttgtcgaagttgagttcgtttaggtcgttaataagttgcgatagtttagtttttatgtcggaggcgttgtttagtagtagaggcggcggttcg

SEQ ID NO: 297 - DNA, 152 bp, Artificial Sequence
  Description of Artificial Sequence: Synthetic polynucleotide
cgtagttttttattttagtgttcgttcgggaattcgggagtttttcgcgtcggggttaacgtgcggcgtttttcgtcggttatagcgggcgggagacgcgaggcggcgcgggagtaggggaaggaggggaaggagcgggggaggaggggacg

SEQ ID NO: 298 - DNA, 2 bp, Artificial Sequence
  Description of Artificial Sequence: Synthetic oligonucleotide
cg

SEQ ID NO: 299 - DNA, 2 bp, Artificial Sequence
  Description of Artificial Sequence: Synthetic oligonucleotide
cg

SEQ ID NO: 300 - DNA, 2 bp, Artificial Sequence
  Description of Artificial Sequence: Synthetic oligonucleotide
cg

SEQ ID NO: 301 - DNA, 424 bp, Homo sapiens
tgcgggcgcccggctccgggtcccctccgtccctggggcggcccacgggtcctttgggacggggttgcggccggaggagactgaggagatcgggcgacgacgcgctccgcgggcgcagagaggccgcggcagctttgtcccggcgcagggagccctggagtggtggagctgcagctggtccgaggcgggagttcggggagaggcggggtttttcgtacctagccaccctgtatgtgtgtccgcactcacaccctccatacgcgtgccgcctcacttccctttccctctcgcaccccggctttgcgatcgggggtcggggggacgcggggacccggccagggctgaggagggaggcgcggggctgcagagatggcgtggaagtcctgggcctcgtgctgtcctccgccccgccccgcccgggggc

SEQ ID NO: 302 - DNA, 581 bp, Homo sapiens
cgggcaggatgggtcggtgagttcggggatgtagcctaagcagggcgggggccaaacctgggaggttgtggactgcagcgggtttcagaggaggggaggcttctggaaggaccggcgcgatctccctgaacgaacatcgcggtctccccgaacgtcgcggtccctccgaacgtcgcggtctccccgaacatcgcggtgcccccgaacatcgctgtctccccgaacatcgcgatctccccgaacatcgtgatctccccagacatgcccagctgaaggcactcagttcccctcggtggctcctttccgccgggtccgcttcctgcggctgctgcttgcccctcaggccaggaggtttctggaaggaccggtgctgtctccccgaacatcgtggtctccccgaacatcgcggcctctccgaacatcgccctctctccgagcaacgcgatctccccgaacatcgcggtctccccgaaaatcgcgatctccccgaacattgccatctcaccgaacatcgcgatctcgccgaacatgcccggctgaaggcactcagttcccctccgcggctcctttccgccgggtct

SEQ ID NO: 303 - DNA, 656 bp, Homo sapiens
accaaagcatctgggatggccctactgcatcagatccaagggaacgagctggagcccctgaaccgtccgcagctcaagatccccctggagcggcccctgggcgaggtgtacctggacagcagcaagcccgccgtgtacaactaccccgagggcgccgcctacgagttcaacgccgcggccgccgccaacgcgcaggtctacggtcagaccggcctcccctacggccccgggtctgaggctgcggcgttcggctccaacggcctggggggtttccccccactcaacagcgtgtctccgagcccgctgatgctactgcacccgccgccgcagctgtcgcctttcctgcagccccacggccagcaggtgccctactacctggagaacgagcccagcggctacacggtgcgcgaggccggcccgccggcattctacaggtacccgcgcccgcgccgcccgtcggggtggccgccgcgcccggcaggagggagggagggagggagggagaagggagagcctagggagctgcgggagccgcgggacgcgcgacccgagggtgcgcgcagggagcccggggcgcgcggcccagcccgggggttctgcgtgcagcccgcgctgcgttcagagtcaagttctctcgccgggcagctgaaaaaaac

SEQ ID NO: 304 - DNA, 651 bp, Homo sapiens
cccccacgcccgcccgccgccccgtgggtgcgcacgcgtgtccgcgcaggcttcccgcctggcgagtgcaaggctcctctccgccgtgctgctttccagcctctcagcaaatcacgaacaccgaaagaagccacggcggcgacgggaggggcgtcgcgcgtgcttccctcggcgacaaagcgggagccgggcgcgccggccgagggcgcccggcgcagagtcccgcagaggcggacgccgcggcacgcgcctcgaaaagcctcaaactcttatcctcggctctcccgccccacctccgccccgcagccaagacccgcgccgtggcgggcccgacggccaaggaaagcccaccagccctccgcaccgtgggcgacgggccaagacccggccctaaacggccagacccagcccctagtcggctgccgcccccgccccacgcaggcgcgctccggggccctcccctcccccaccgcgcgctcgcggggcccgacgggggcggagcgaccctcggaaggggcgtggcgaccgggctcgacgcgcgcacgcgctctggagccccacggctacgtgtcgggccacgtgatgcccaccccgaaagtcccccgtgaagcaacaggacgttaaaaaaaaatttctcttctgcggggtgga

SEQ ID NO: 305 - DNA, 564 bp, Homo sapiens
ccccggcccgacccccgccggggcggcccctttccccgcttgggatggtggggagggcgggaaggtcacggccgggcgggaccgagcgccggggggactgggaggccaggagggcgcacaaaggaggtgccgggccgggcttgcggcgggcgggcgggccggggtggacccgccggtgccggacgccccctgcccggccgggaccccgcgccgctggcgtccaagttggcgcgttgcggagggctgcggggtgagccctgcggcccctctagcttcggcggtcacatttccgagaggtcggcgggggctgcgcggactcggtggtcctcgccgagccctcccgagagcaggcccacgccgcgccgccggcctggaggacgcgtgtgcccggcgcgggccccgctcctccgctcggcctcccgagcctgctctgcgcggacccccaccgccccgcgttcgggagctctcccctcccgtgaggactaaagcggggtttcgtggttggggagttggtgcagctgttcaatactaagtggaagtcagtgtggggctcgttagtttaaa

SEQ ID NO: 306 - DNA, 495 bp, Homo sapiens
tgcagctcccaccccgagcgcgcagctccacgcagcctctccacactctccccagcgcttgcagcaccccccagtgcgcacagctctgccagtagcttcccggcgcgccgcccctgcaccgcttcgggccataaccttgctggcgactaagtctgaagaacttcctgtggtttcattcttttcttcaggtttagtcttagctctgacattttaaccaaaaggttacacgttaattaacgaggtattaaaggggaagatctcagctgaaagaaatgactgtaggaagtgtgtcagggaagccaacggaaccgctggcccgccggtggtgcgcccggcattaggaaagtctctacgatcgctgaggtatcgggcagtcagtgcccgttgccaacgcggagggaacgggcggagactgcgggcaacacgtggcagagccggcgtgagtccggtgggtctgatcccagagcctcaggttgacgccacttccttggcacg

SEQ ID NO: 307 - DNA, 710 bp, Homo sapiens
cagtagaaagttggctcagagatagggcagaagaaccggggggctgggcggctgaggccgggaggtgggagaggcgggtcctgcagccccgagagccccccgcggctgcagcggcagctgtcacctcctggcctcgccccacagcacacctgagcctcctgggcagccccgagcccacagctcccagcagaggcgctaactgccctcctcaagcacaggtcgccgcgtccccaactccctgtcctcaccccggcccgcccgtctcctcctccgccctctcccgactgcagcgggggcagcgctttggcgctcccaaggactccccgccactctccccacaaagcagcggcggtggcggcggctgctgctggatcttcacactgcagccagcagcccaggacgcccccggccggacgatgggtacccgcgcctgagcatcccccgggcaggcgccaggcgcgaaggcagggggcgggaggaaaggggcgggggaattcctgattccctggtggaccctggaagttgtccttaaataaatatatcgctggcccgcggttgagcagccacctcgtcagagcagcatgtggactggctcgccgggtcccctccgtgctctgtgctgtcgccgccgccgcctctgtcagagcagcagctgtcggcagcaggagccccgcacggggcgcggagcagggacgcgctgccaccgcctc

SEQ ID NO: 308 - DNA, 586 bp, Homo sapiens
gacagtgctcggtaagcgggggctcccgctgaagccccggaactggggagggggcgccccgggacgccgggggcgtcgcagggccagtttctgtgccgcgtctcggggctgtgagccaaaaacattcagtacttcggcgccgggacccggctctcagtgctgggtaagctggggccgccgggggaccggggacgagactgcgctcgggtttttgtgcggggctcgggggccgtgaccaagagacccagtacttcgggccaggcacgcggctcctggtgctcggtgagcgcgggctgctggggcgcgggcgcgggcggcttgggtctggtttttgcggggagtccccgggctgtgctctggggccaacgtcctgactttcggggccggcagcaggctgaccgtgctgggtgagttttcgcgggaccacccgggcggcgggattcaggtggaaggcggcggctgcttcgcggcacccggtccggccctgtgctgggagacctgggctgggtccccagggtgggcaggagctcggggagccttagaggtttgcatgcgggggtgcacctccgtgctcctacgagcagta

SEQ ID NO: 309 - DNA, 466 bp, Homo sapiens
tggcctctgccacctccgccgccgccgcctgggtcccctgagccaagggccgggacgagggagggggaggcggacaaagggtcggggtcggggagaatcgcgcgccgggaactcatttggggcgcagctccaccgacccctcggctactcgcctccaccaggcaagccaggtcctcccatgctctgagccctaaggactctgcccgaggggctctcggggacttgggggcggtcccccaatggagggtgcgacagggaaagccccgagtccgccctccctgggaaatcacgcgcacacccaggattctactttggtctggccggagtggggatgaggtgcgagccgctgcggggtcggtggagccgggatgtcaagttcaccttccagccgccgcgggctccctcggcctggggcgcctctaatggaccccggggtcggcctgagccctcccggagcgcccggcgg

SEQ ID NO: 310 - DNA, 587 bp, Homo sapiens
ccagcgcgcctggcggcggcgagcgcggcgacatcgcgggagcggaggctcggcctagagggcgggcggcagagggcaaggaccgggcttggggagcccccgggcggtggccgctgagggcccggacgcgctactcccgagcccggggtgcggttcctccccgggcgccctcggcgtggggcgcgcgcctccggggctccctggggaagagccggttccccgcgccgcacgctgggagcttgatttgcccctttcagaccatgtgggcctttcatttgcatatttccgaattatagatgaaaacgtatccaggatcaagtgaattgttttcctttgagtcctcttgggacagaaaaggaagtaggtccccgctccagccccgcccgtcccccatccccggcgctcccgcgcacgcctccctggggacgccgcctgcgcccgtgccccgcggggaagagctgcacttgggtccgcagcgccagcccagcctgcggcaggcggagggggcctagggctcagccaaccaccccgtcacgccgcacaggagccagccggggtccccggctcgggagctgccgcccacccac

SEQ ID NO: 311 - DNA, 459 bp, Homo sapiens
ccgcgctggtcactccatcctcgtccggccgatgcccaagtcgacggctgtttccaacctccgctggctgtgacttttatgcgggcgccccgcggccaggcgtgtgtgctccgaccggctaaggcaggtcgggcggaggacctggcccaccggagaggctacgccgggggctgaggcggcttagagggtcattaatcaaaccctccggcggggcgggctcgggggcggggcgtcctcctggccccgcccctcggctcactgcctcacgctgctttccccgaggcgcctcgctgagggcggcgtgtggagagtttggggtgtctgccgccggctgcggtggggccgggctggaggccgcgggtgaggcctgtggttaacctcgcgctgccgaggtcttacctcctcgagtccagtctgattccaggccgcttccaggccggtgcccagctgaggcgggaa

SEQ ID NO: 312 - DNA, 524 bp, Homo sapiens
gctgccggcccgtggccggggagcaaaggctggcccgccgcgccagggtccccctcgaactcccggaggtgtggtccctccgcagcgcggccccggctctcggtcctcgccagccgcctccactttcctgggagcgagcggccccggaggagggaagcggcggcggcgcccccaagagacagcttggagcaggcgcctctgctgcaggctgcgtgctgcctcggggcggtggtaccctccctcctcggccccaaccgccaggcctgccgtttgcgcccctcaggggccagcccggagccagagaagcctcgccctgggccaggcgcagggcccagctcggaacagccccattttctcggttgggtatcgctctccacaaagacaggcgtctattcccgaccctcgaggtcaggcaaaggccacgagtctttagagtttggatcgatgctaaaagctgctgcgctcccctgcaggccccagcctctcctctcgcagtccccaacctcttctgacgcagactttag

SEQ ID NO: 313 - DNA, 530 bp, Homo sapiens
gaggaggaagcgagcgcccccgagccccgagcccgagtccccgagcctgagccgcaatcgctgcggtactctgctccggattcgtgtgcgcgggctgcgccgagcgctgggcaggaggcttcgttttgccctggttgcaagcagcggctgggagcagccggtccctggggaatatgcggcgcgcgtggatcctgctcaccttgggcttggtggcctgcgtgtcggcggagtcggtgagtgggccaggcggaggatgcgcgcgccgtttagggtgtttgaagctacgagaggagcccgcagggaataggggagcgccacctggggaacccccagtccccaagtatacaccggagatccgctgggacaaatgcgctcgtccggtcaccctttccccctcttcccttcctcagaaaagcgctgctcgctggcgttaccccgcggtccgcgggaatgggggcaccgagaattgcggtttggtctagccgcagaggcccctgaagtcactcccaacttcttcgccctcggcgggt

SEQ ID NO: 314 - DNA, 465 bp, Homo sapiens
ggtggtatacggtgtgtggggtctggggaggcgactgtcacgtctcctagaaccctcatgccttccactcgtctgcgaccccggctgccgaggaggcaacgagggaggtcgagccgctccctcccgtgggcggcagcgaaactctgcgcccgcacgccggggtgccgccgagtccggctttgagtacccagcaaggtcaagcaggcgaaggagggggcgggggttcctgggcgcgcccccgtccgcgcacagtcggggccttggaagggggtgtgcgcagcccgccgagtcagtcccgctcgcctgccgcccgcgcccggtccccggaggcggacgttgcgcgcgttcggggatcccggagcgcccggcgccccacgccctcccttcggctcgctagctgctccttggcgctgctttcagacttgttgcgcctcgatctggggggcagaaggctggcccgggaga

SEQ ID NO: 315 - DNA, 454 bp, Homo sapiens
caactcgggggagaatggcaccggcgactgggctccgcggctcgtgttcatcgaggagcccccgggcggtggcggcgtggcccccagcgcggtccccactcgccccccgggaccgcagcgctgcagggagcagagcgactgggcatcggacgtggaagtcctggggcccttgcgtcccgggggcgtggcaggctcggccctggtccaggtgcgagtgcgggagctgcgcaagggcgaagcggagcggggcggcgcgggcggtggcgggaagctcttttcactctgcgcctgggatgggcgcgcgtggcaccaccacggcgccgccggcggcttcctgctgcgcgttcgcccgcggttgtacggcccaggcggggacctgctgccccctgcgtggctgcgggcgctcggggcgctcctgctgctagccttgtcggccctgttcagcggcctgcgc

SEQ ID NO: 316 - DNA, 380 bp, Homo sapiens
gtctggccgcccctccatccttgtcggtttctcgggtcgcggaccccgcgcggcgccgggcgatgctggcctgcccgtggccaccacctcgcttcattcccgtctctttgggccgccgcattcgtccacgtgcccgtctctccctgcgcaaaattccaagatgagcaaatactgggctcacggtggagcgccgcgggggcccccctgagccggggcgggtcgggggcgggaccagggtccggccggggcgtgcccgaggggagggactccccggcttgcgacccggcgttgtccgcggtgctcagcgcccgcccgggcgcgccatggggaaccgcagcaccgcggacgcggacgggctgctggctgggcgcgggccggcc

SEQ ID NO: 317 - DNA, 357 bp, Homo sapiens
cggacacccccgggcccaccgtcgcccccctcgccccctgctgcccccaaagtcccaccacacttctgggccgggcggcaggagtggggacgggagtggaggtcttgcggagcagcggctcggggagctgtgggctgcgggctgggcggggcggcgcgatgcggggcgggcggctcagccccgctccccctaccggcgccctcaggggatgaatgtccctcctgacggtctctttacttattgatggactaatcctgctcgttaattccccagccctcgttaaaaatgaaaaggagccgtttgtgcttgtacaaacccaagagccaggatggatgtgcgggggtggggcgggcggcg

SEQ ID NO: 318 - DNA, 421 bp, Homo sapiens
tgtctcgcttcctctctctctctctctctctgtctctctctccctttccctcctaccactgcctcttcctcccgctctctacctccctgcagcgccaagccggctccccaacctggtctgctgaacgcaaaccgctgagagtttgctgcaccgccccctggggcccctggctgccgagtcccgctaaggcaaagacgccagcaagcgaggaagcgcagcggaagaaaaacaagcgggcgcgcgaggggagccccaggagggctgccgagtggctggcaggcggctcccgcccctcccgggtggcctcgccggcggctgacggcccggaggacgcgcgctccgaaaagttagactccgggcggcggcgcgctacgccgcgtcccctcgcgtcccttcctcgctgcgctccgggaaaggaact

SEQ ID NO: 319 - DNA, 435 bp, Homo sapiens
cgcggacccccaccctgcggcctgtgtgctcggctttctccgcgtggcggggaagtgcgggtggctgcccgggccctcagaggccgcaccacctattgtgttccaggctcgcaggaagccagaccttgcgagaggtgtgtgggggcggagagtggcacaggtttgacactgcaggtcggaggaggaagacagtggctgcaaaggcaaaatcgggtgttattttcccaagagtcccttcagcgtgagtgccggggtcagctcgaactggagcctgtaatttgtgagtgcgagtggggagcagcaggagatccttttcataggtgaggtccaggaacgagcctggtcgtgctaggcaaggcccttcccactgtcagcctgtgtttacccatccctgcttctccagactgcataactccgtgtcggctccatcacccg

SEQ ID NO: 320 - DNA, 492 bp, Homo sapiens
cgcgcgcgtgtgtgtatgtgtgagggtgtgacggaggcgcccacgtgctcggcccgcccgtgttacggccgcctaccggctgcagaggagaagggtaggctgtgggcggcggcggggcgcggaggggtagccaggagcgcaggctgggctccgcacctccctgccccaaaacccattgatgcagcggccactgcggctgccgagcggcgtcttcccagagcccggggctgtgcccgcccgatgcaggatgcaactgaggaagcccgctccaaagcaaaacaaaacaaattcctccagccatgccgtctttctccaacccactcaagcgaaagaatggacaccagttaccagccgctgacttttgtctcagtgagaataataataggcatggtgctacctggcaccatctgaatattctccaagagtcagtaatgggactagaaaaaatgggtgacccaaagaacccttttccctacctattcccccaagccg

SEQ ID NO: 321 - DNA, 450 bp, Homo sapiens
ggagccacgtctcggcgagcgggggccgcggagcgagggggccgctgtgccgctactcacccgagccgctcgggctggccgcgagccgggatccgcgagggctggcgggctctggcccccgaggacgcagacatgtggcttgaacctccgctcccctagccgttgcctctgtgcatctttctgggcgcccccagcgaatgcgagcggcgaggcgagggcgagcgcgccgaggaagggcgggagaggcgcggagcttggccgcgccgcgctgcgccgagcgccgggctctccccgcgagctccccgggcccgcgcgcgcgccccccactgcccccgccccccgcgcggcgcgtgccccccaccccccgccgcgcgccctcgcacccgcccggctccacgcggcgcgcgcctgccctggcggcagcggcggcggcggcggcgcgtcctcccc

SEQ ID NO: 322 - DNA, 448 bp, Homo sapiens
tcggcgcggcggccgaggggcctgggagggaacgggcgcggaggcgggaccgcggctccctcccactccggggggagcccaggaggcggcggtgctggagcgcgagccggagccggagccggagacgaagagaggcggtgagaacgcgggtgcttagggaccccacccccggctcccgctgggggcccgcgagcggctcggggacgtctgggctggggaagcggggctgttacccccagggcgggaggcagagacgatccagctcctggcttcgccccctccgcgacgcgacccccgaggggccctgggccgcgcctgcagcgccgcgcatccccgtgcttcccggcgcaccccagcgcacccggcatccccccggcagggcgagggccccgggggaagggaaggctccgggagccaaggagggcgccccccaggcggagagtctcgg

SEQ ID NO: 323 - DNA, 393 bp, Homo sapiens
ggcccggcacaggcgccggcggtccccgccagctagcagcccggcgaggcgctggcccacccatggtcctcgggcggcggcccctgcgcccagccctgcgcgtagcctccgtctctcgcccggggccgccgagcccccgacacgggcgagatgctgaacggcgcaggcctggacaaagctcttaagatgtccctgccgcggaggtcgaggatccgctcgtccgtgggtgagctgggaggggcgcggcgagggagggtgggcccggggcgggggcggcgcggggcgcgcctgcggttatgcgacactgccccgcccgcgccccgctcccctccctgggctccctgggctctctgggctgcaggatccgccgacgcggcgcgctggccgcacggg

SEQ ID NO: 324 - DNA, 367 bp, Homo sapiens
tctcctccgcgacgcggtcccctccgcccctcgtacgccccccgtgcctccgcccggcgggggccgcagccgctccttccctggcgcgggagagaaaaggcgcgcggccagtcgtaggtggagacaccccagctgtgcttccggggaccccgcttggccgctgcgccctgcgccccgcagccgccagagccgccccaccccgcgacgcctgggctgggcgctttaaagccgccacggcccccgccccctccaggccagcaaggcgcgcgctccctccgccagccgctatggtggcctgggaaaggcccggcctgcagaacgtaactgacatcgcggaggctctctgggcctcagtttctcctcccga

SEQ ID NO: 325 - DNA, 519 bp, Homo sapiens
gagtccggcagggtcacgaggcgccggccccggggccgcttgaaacccgaagagaccccgctcgctcgcgcgcccgccggacgaatcctcgcggaggtcccggggcgcagccggcgtgagggtggggtctcatcgcaggggcgccgggagcctccccgctccgctagctcaaccaaggaccgctcagaggggctctcaccctgaacctcggcttttctaaaggaagggcagaccccagatttcccccttctcttctcgaacgtgctttgggtgtttttctgctttcttttttggcaagtcaggacagcgcacagtgcacggagctccgaagctctctcagctactcccggatttctggttaaacctgagggtgagcccgaaagaccgctgccgccggcggccaccccagcgcgggtccgctgagaatggaaacagcaagtgcgcgccggccaggccgccacctctccctcctccaacagcccgggcagccgcaggggccagccccgggccagccagggc

SEQ ID NO: 326 - DNA, 459 bp, Homo sapiens
acaccacctggcggagtctcggggaagagtcttaaaggcgcgcgctcctccgtgccccgcgcactcgaacgggagccgcggagagctcgcctcccgctgccgccggcgcctcggggaggtaagtgccacccgcggatcccgagtcgcggccgggtgggggcggcccgcggctgccccgcgctcgggaagctctggctggggctgcggtcggagggcggcgcccaagttttcttgaaggcctcggagggcagctggagcggcgtagagcctgcgcggggatggcgggggtggccgcgggccggggccgtctgggggcggccatcccgggcggtgcgtggaaaagtaggcactggtgcgcggcgaggggcgcacgccagagccccagccccgcgtcctgcgcacttggcgcgctctggccgcggtcccggcgagccccagcctgctccgggccgcgacccc

SEQ ID NO: 327 - DNA, 384 bp, Homo sapiens
cgctcggctgtcaggcaatccggtccccggttccccacggcggtctcctcggtgtgccccaccaagagcgacagggctggtgacccgaggggcgcgtgcgcggtcgtcagcctgggatttgcacggacccccttctccctagtacgctcgctcgggggcccctcctctgctacgccgctggggctcgcccgccacccacagccctcgcagagccctccgggcacaccgcggctggccgcccggggccaaggatggggcgggagcgcccacccacccccgcgccggccggggcatccaagaggcgcgctcgcagccacacggcgccccgcctcccgctccgaaaaagctcctgctcccctggcgcggtgtggcgtctccgtcagc

SEQ ID NO: 328 - DNA, 545 bp, Homo sapiens
ctgcgcgcagccgggggctgggggtccccagccagcagggacccacgggcagtcccgggtgccgggatcgggcgtccgcccctcgggcgggagcagaggccggctcgatggagacctttttgagaaatggcggcctctacccgccccccagcccccgagcgcccgccgtctgcgttcagcatctcagcttttaagcctccctgagccggggctgcgttctcgttgtctccttcggccgccgcttcctggcgccagagggaccccgcggcccgcacgggcctgtcctcggctccgctcggagggtgtgcgggttcccgctccgctggccccgcttgcccaccacggcgcgcccaaacccacgcggcccgcggccccttgcgtgctctgccgaccccgggccgcaggaggggttagcctcgccggtccccacgcggggtctgcgccggcagcgccacgggctggaacgcgcctcgggagaaattacccgcgcggggtcgcggcgtcttctgccccaactcccgtagggagccgctaggcgggtgccc

SEQ ID NO: 329 - DNA, 291 bp, Homo sapiens
gagaagggtggaggagcgcgtccggtgccccaaggcttccaggcggagcgcgggcgcgaggtgcgggctccggggcggagcgcacgcccgggaggcgggaagtgggcagcagcgcccccgcctggcccctgtgcgccccgacccgacgcctccccgcccgaccaggtgcctcgagagcgcacagctgggagggctctcccggtcgcggcgagactcacgcctgcggtgtgctagggcggcggcgacggtgacgggcgtggggcgcggcgctgcctcggctgccgggtcgtt

SEQ ID NO: 330 - DNA, 492 bp, Homo sapiens
cagcgacctcaggcaccagctccgaaggagggcggggagaccgcaaaggggaagtgcccggagggccaacggcccccgcgcaccctgcgcccctctgaagcgcgccgcctccccgcgccggggactgggacctgcctctggggaatccgcctagaagacggcggcggactggggtcgggcactctccagggctgtcaggccctccccagccctgcacctgccgcgccgccccacctcgccaggaagtctcagagaccccggggatggggtgggagcgccttcccatcgcgggctcaaaaagaaggaaggacgcccccaggggtcgtagaaggaggactagctccaagccacaactttcttcggacccaaggcaggccggctggggctccgcgcctacacggcccctggcgggggtccgcgcgccccgggagccccgcggctcggggaggaaagaggagacaagagacaggcgaggattacggggctgaccca

SEQ ID NO: 331 - DNA, 381 bp, Homo sapiens
tcctgggctttgagcgcgtgacatggtttgccgtccctgaccaagacgggcacggccacccggcgcggcgagggcaggggcgtcacctccatacctttctcggcccgggcgcgcttcatcttgtagcggtggttctggaaccagatcttgacctgcgtgggcgtgaggcggatgaggctggccaggtgttcgcgctcgggcgccgacaggtaccgctgctgccgaaagcgccgctccagctcgtaggtctgcgccttggagaaaagcactcgccgctttcgcttcttgccggcgtcccccccgccgcccggggtctccttgtcattgtccggtgactcgtcggccgagggctccggggacttggagcttgagtcctgaggg

SEQ ID NO: 332 - DNA, 430 bp, Homo sapiens
aggcgtggggagcagagcggcgctgaggggagggcagaggaggagagagcctggcagcggaggagcagaggcgggcgccgcaccgccccgcacgctcgctcgctcgggagagtcgcgggcggccgcttgggcgcacttgccgggtcaccttgtcccggaggtaagtccagacctcccggccgcgggggcgggcggaggggcccgcagtgggcggggtcgcggcaggggccgcgagctggcggcgggagctggaggctgccctgcgctggcgggtgtcctagtcctggctccgcctcggagcgcgcagacccggcggcggcgtggcgcccgcggtaagtccgggtggtcgccgcgacgagacttgggagacacggggtcgcagggcgggagggggagctgagccggcagagaaaatgcccaggaaggggtc

SEQ ID NO: 333 - DNA, 643 bp, Homo sapiens
tctgtccttccttctttcgctcagcctcgcctctcgcctgccgggacgccagagtccctctcctttcctcgttgctctcttcctggcgcggactactctccgggcagcaaagcagctgtcccggcttaacgcgcaaagttcagaaagccaggagtctccagatggccttggtgacttctcgggactatgcctcgccgcccttcagcctggagagaagttactccgggacctcccaccctctcgtctctctctccggctctgctcgagtctaggaggcggcgctggcgtgcgctactctcgccttagccaaggtcccctgcccgcccgcgcacccgcccgtcgcccgcggcccgcgcgcccttcctccctctcgctcaagtcaaacaggtcaaggctggggccgcggcagggacagggtccggggtagtctgggactagggacgtgggacagggagtccgggccggggcaagggcgggggccaggaccggccacgactcacagaaagaactcgggagaggaggggctgtcgctggtggagcccgcctccctgaagccggagttggcgagtttctcgcacttgaccttgtaggcgtctctctcgcgggccagccgggacacctcctgcttaagctgctccacctg

SEQ ID NO: 334 - DNA, 458 bp, Homo sapiens
tgaggccttccctggacaacgcatttgaaacgtaaccccaaggcaagaagccaccttccaggcgcgcagccgaagcccagtgccaaggaggccggagactcgggtgcccgcgcatcccgaaaacagcctctgaggggtcctctgagcatccttccagcgtgtttgggaggcaaactcgttgactagctcttgagaggagtggctagaggaatccaggcggggaaggggacggtggactccaggagagtgtaatttacaaaggcggggggcggggacgcccaggtccgagtcccaggactctgcgccggacgcttcgcccgccctttcaggtcccctgcccggtcctcgtacccgcgcgggtccggagaacctctgagcaccggcccccagcccccgggcggggctccagcggcgctactcacccggctcccccgccacctgcggggccacctccgcac

SEQ ID NO: 335 - DNA, 452 bp, Homo sapiens
gggctgcccctgcccgcaggcccgggcgcttccgccaggaggcgacagcgccatgttcctccaggttcccggcgccccgagacccctgggcagatggggacgcatcctttagaaactgagtcgggccgcccaggggcgagggaacgtgcgcgggcaaggctgcccaatttccagggttcttcatgccccctctgcgccccgacgtgcgagaacactgcccttggcagtgcagggcgcccccacttattactcccctcggctgggcccggccagcagggagggccgccctgtgcgcgcgctccctcttcacttcccagggcggcgcagggtggcgggccctgctttccgagcgccgcccgctcggaggtctttgtcccgagggcgtggaagggagggtcccgggggcgggggaggtgcgcatttcccgcgccgcgcactctatccgcgcctgc

SEQ ID NO: 336 - DNA, 440 bp, Homo sapiens
gtcccgtgtcccggggcgcgctccagctccggcaccactagctcctcgtcctcctcggaggggcgcccgagtgcgtccgacacggccagtagcgccgcggcgagcagcagcagcgtgggtactggcccaaagctccgagaccccggagcccgctccgcgttccccatgtcgctgcccagcttgcgccttccgaacccctcgggcacagctcgctgcattggagccccaggagacaccgctcgtagcagcgcacggagcgagggacctttagttcgggtcgggagagcaaagcctcgttggcctgctctggattgttaaaattaacaatttctattattcgttggaagggcgcgcagagccggctacagccgaagctcccggagtcactaaaaggaggcgctgcagttctgccggcgcgcgggaagtttttcttccagcgc

SEQ ID NO: 337 - DNA, 439 bp, Homo sapiens
cgggacgccctctgcctcggtcccgagttcgagttcgacctccgccactcagctgggtgtcctggggaccttggtttcttccctttagatccggacactgaagcaggcggtagcgggtgtcttcctacctggctaccccttcggcgcctagcgcgaggcagggtgggcgaggcgagggcggcgccctgcgagggagggcggtcgcagaacctgcgggccttcagcgccccctggcgaggcttccctccaccgccggcgggacccccatgggcaaccgggggagctgggactgaaagcctggagagccccctccgttgtgctgttggggagactgaggcccagtgagacctcagggcctgccaggcgttcccaacagcgagggcagagagtacacggagagccggctccccagggggaggaagcaccctctttcctcccg

SEQ ID NO: 338 - DNA, 396 bp, Homo sapiens
tctgcggtgcgaggcgcccccggcccggcgcggcggcggagcccggctggcgggggaggggagggggttgcggagggggcggggtgggggccggagccgcttgagccggcgggagcgggcacccctgcgcgccgcgctcggcctcgcctccgcgccccccgcgcgcccgccgcggtccctcccccgcgcccgtccgctcgccgggcccccgccgccgccccggggtgcagccgagcggccgcgccgggtccccgggacggggtggaagtgggggtggggggaggggatcggggccgggccggggccgcgctgcctgcgatgccgggcgcccgccgcagccgctgccgccggagcccgggatggggcgagaggctgcggcggacgccagcatctccc

SEQ ID NO: 339 - DNA, 418 bp, Homo sapiens
gacagtcatacaggccttggggcagggcgcgcctcgcgctccagggagccacgccagcccgctgcgcctccgcagcaaccgccgcctgcacgtggcggggcgagagagctgctagggcggtttctccgcctcgggcctgttgggcggggccggctaaggtgcgcgtgctcgctggtcctaacggttctgttgggcgtttctgctgagaggcgggaggggctgagagtctgtgcgaaggtaggtggacagactgcattgcttgttgttgcgcttcggaggcggcgatccccgaaggcgagctgaaatacggctggagcgttcccaggctacagtttgtagccgacgattgtggaagactaggagccggagaggtggcccaccctcagggagcgcttgtgctcggagggcttctcatttc

SEQ ID NO: 340 - DNA, 363 bp, Homo sapiens
caccgcggggctgcgacgacgcgggtccggagcgaaggcgcggagcagggaggatgcgctgctgctgggaactggccggcgggagcgcggtctcagccctcgccagcagccacgcgcgtctgggggcggcgcgctgcgagcggctgagaccgcgggcgggggcgggcgcctggcttgggcagcgtcctcagcgcggtgtgggcggcgagccccgcagggctgcaatcgttccggggtgggggccgggacaggcaccgcgggcgcaatctgagcccctgcccacgcgcagcggcctctcagtcccgccggcttaggtaacccaggtcgctgcggtaacgcagtgaccgcgctccaggtccgcgt

SEQ ID NO: 341 - DNA, 371 bp, Homo sapiens
gcgggaagaaggcacgaggcgtcgccgcagctcggtcaggggccggggccccgccgctcgccgctgcactaacttgccgcttggtctcgcctcgccgccgcggctcgctgcgctttgggtggcggggggcggggagagcggggagtcagagggtctgcggtggccgagggagggaccctacgacggggagcccgcccggtgccgctcttcttcccctccccgcccctccgctccccccaccccgtcccttccgccgattccgggagcgacgggcgcccgtgacctgcgaacgctgccaagtgacggtccccgagtctgaagcgcccgcgaggaagcgagcgccagcgcgggccgccggcgatgacggccgc

SEQ ID NO: 342 - DNA, 397 bp, Homo sapiens
taggtcccggaaggagctgcgcgagaaggggccgccgcgggtgctggagccgctgaaggacgtggtgctgatcgaaggcagcgcggccaagctcacttgccgcatttcggctttcccggacccattcatccgctggagtaaggacggcaaggagctacgtgacggtcccaagtaccgctacgtcttcgaggaccctgacgtggtggcactggtggtgcgcgacggcgagctggcagacctgggccagtacagcatcaacgtcaccaaccccttcggccagtgctccgactcggcgcgcatcctcgtggaaggtacgcgcgccccgggcgcagcgccagggcgcagaccagcaccactcagccagagcccgcagcccggtccagctgcgcgtgtttac

SEQ ID NO: 343 - DNA, 366 bp, Homo sapiens
ccgagcgggcgtccggtgtctcccagcgcccgccgcctcctctgccgccgcgccgagcccgccgcgccgcccgcctgccggcccgagggagggggcgcgccggcggctccaccctcctccgcccgccccgcgcgcccctccttcctcctgcatctctcgggccacctggcagtggggcggcagcgcggacgtgggtcggcggccgcggagacaggctcccgggggtcgtgcgcgggctgcggtcggggactccgggtccagccgcgttccgagacgagtgagggcagcgagtactcccgtgaagggtcccctccgatccagtgtccccactcccagccgcccaccagccggctggaaaggggctgg

SEQ ID NO: 344 - DNA, 907 bp, Homo sapiens
cgcggggcaccagctcagctcccctctggggatttcgtactcgcagtttaaggaaccggtggagcacgaactccactcctgagctggcgcaagcgtctcccttccatggagatccaccccggctcccctctgaggccccctttccaagcaccctctcttccgagcacccagcacctccccaaccttagcacggctcggggcaccagttctccagggcgggggctgccccaccgctcaagggaggggacagagggccggcctcggtccaggcgacccctgcccctcgccaggggcgccaccttggccccctcccgactgccgtccgccgcctccgcccccccggggggtgtgtctccgaagtacgggggcgcgggaggccaagggtgcccccagcctccgaccgagaccccctcccgagccggcggcgaatggtaggctccatttaaagagtgcctggtggcgcgcggtgtccttcttggagcagctctcggcgcccgcccgccggggtctcggcgatcgctgctcctcctcctccttctcctcctcttttttctcctccgcctcctccccccgccgcctcgccaccgccgcggctagggctggaggcgccgctgtcattcctgtgccggaggaaccggcgctgccggtgcctgggggtcggggcgcgggcgaagccgggccgcggaggacacaacaggtagagccgggggtgcccggccgcgcgccccccgcgcatcatgcagctctttgtcacctctctcgcccccaggccaaaatcctgagcatgatggaagacaataagcagctcgcgctccgcatcgatggggcggtccagtcggccagccaggaggtgaccaacctgcgagccgaactcacggccaccaaccggagactggcggaactgagc

SEQ ID NO: 345 - DNA, 562 bp, Homo sapiens
gcccctctagaaagtgcgatccctccccaggaaagaagcagggctatttttgctccaaaagtatccatcctgcacgccctcttcagtgcttggcacgtggcgaataaaccaatcaggatgaaaggagccaacccaagtgcggagtgttgaacctcagaggaagaaacccgcgttcaccaggcccaggcctgggccaggcgctgtcctggcggcgtcagggaggacatcgtgcccagagctcggacccagcagcccggccccgcgccctccctgtcccgcggcccgcaggcccagccctcaagcgcccagcctccgcggcctttgtggcgtcacagccagcctgaagaatggttgccttggagacgtaaacccaagagccctgctcctggagctgagaactgcagcgcggaggcttcggagcgagccggggcagtcggggtcggtgggtgcgctcgcggtccggggagagggggcgcgcggggtccgtgagggcgcgtgggggcggcggcaggggtgcgaaaccagggcccgaggggcgcgcgtggccgggagcggacttgca

SEQ ID NO: 346 - DNA, 563 bp, Homo sapiens
gagctgcaggaggaagaggaagaggagcaacccgagggctgcccggaggaggaggagaaccgtgcggcagagggagatccagcagaggaggaggccgaggcgcagcgtgcgctagtggtcgccatgcactttgagtgcggggacttgttggatactctggagaatggccgtggggaggcgctaggaggcggcgggggctccctgggcccgggggccgggccgccgcctctgctgctgggcagcgcctccgacatgaaggctgagctgtcgcaacttattagcgacctgggcgagctcagcttcggcaacgacgtgcgcaccctgcaggccgacttgcgggtgacgcgcctgctgtcaggcgacagcacgggcagcgagagctccatcgagggcgggggccctgacgccacctccgccaccgccggggactcgtcccgccaggccgacggcgccagtgcagacgagccccactcgggctgagctcctccgcgcgtcgccggcgctccaccgtggctacccatccgtggtcccgacaacctccctgtcccttgcccgcccccagg

SEQ ID NO: 347 - DNA, 509 bp, Homo sapiens
gtcggaggcggatgtgggatggtgctaacaaagcgcgtagccgaggcctggccatagtgggtgctgacaaaccgcttactgcctgcagggaccgagctcccggccgagggaggagggccgagcagggattcagattcttccgggccgatccctttctcagctccttccgccctgccgccgcccactgcgtgctgccttcgtccgtcccctcctcccccgctccttcccctccttcccctgctcccgcgccgcctcgcgtctcccgcccgctgtagccggcgaggagcgccgcacgttggccccggcgcgaggagctcccgggttcccgggcgggcactggagtaaggagctgcgagcgcagcccgaggcggggcacggcggaaggcgcggcgagagcggggtccctgcgagcgcagtcggaagggcgtccaggagaagggggacgccgtccccgcccctgcacggtgctcggccccctcgggctccgcgcgcggctacaacccggactg

SEQ ID NO: 348 - DNA, 442 bp, Homo sapiens
gccctcctcccccagggtgcctggacatgctgagcctccagggccagttcaccttcaccgccgaccggccgcagctgcactgcgcagccttcttcatcagcgagcccgaggagttcattaccatccactacgaccaggtctccatcgactgtcagggcggcgacttcctgaaggtgaggcgcccacggccagccaacctagccggagggcggcacgggagggttggaaagggctggggcgctgcacccagcgtggggctgctgagcgtaggtagccagtggcacttcttagacacttcgctggtgcccgagtcggagaggcgcgttcgaggacccccacacggcgagaatctcgcccttacccgaagacctcgacccacacacatccagtggggctggggccggtgcctctggacgctgccatggtttaaattcccttctgg

SEQ ID NO: 349 - DNA, 441 bp, Homo sapiens
tagaaattgggactcctcggcctcctctgcagcccctcctttcccgccccgaagcccgggcggtttgctggctgcctgcttccccgcccccggctcagaggtctctggctggcgggcgccccgtcggccgccggcttcctccttgaaacccgccggcgcacatgaggccgctgcccccgccgcaggcgctggcggccccctcgcggtgcccgtggtgatgccatgccccgccaccacgcgggaggagaggagggcggcgccgccgggctctgggtgaagagcggcgcagcggcggcggcggcgggcggggggcgcttgggcagcggcatgaaggatgtggagtccggccggggcagggtgctgctgaactcggcagccgccaggggcgacggcctgctactgctgggcacccgcgcggccacgctcggtggcggcggcggt

SEQ ID NO: 350 - DNA, 410 bp, Homo sapiens
cgccctgtccacagcaggattttcttgtcgaactgcgaaggcctgcgctgcgtggggactcggtgaatctcccctgcagcgaaagcaacccagatggacgcgggaactgacgcaccggcacagaggatcagcgcgccctcaagccgactcccgggccggcccctcgctgccctcccgcaacctcctccctcccaggacctccccgtcggagccctggctcaccgtgaccttggggcccagaattgctgggggccccgccgctggagtagcaggggagaccccggggcggaagagccggtgcgggccgtcgcgtggcctcgagaggcgccccggggccgcagcggactgttagcccgcggccaaggcgcagtaggctcccgaccgccctgagcatgctgcccgcttgtccc

SEQ ID NO: 351 - DNA, 424 bp, Homo sapiens
gcccccgggcggggcggggcggaggacagcacgaggcccaggacttccacgccatctctgcagccccgcgcctccctcctcagccctggccgggtccccgcgtccccccgacccccgatcgcaaagccggggtgcgagagggaaagggaagtgaggcggcacgcgtatggagggtgtgagtgcggacacacatacagggtggctaggtacgaaaaaccccgcctctccccgaactcccgcctcggaccagctgcagctccaccactccagggctccctgcgccgggacaaagctgccgcggcctctctgcgcccgcggagcgcgtcgtcgcccgatctcctcagtctcctccggccgcaaccccgtcccaaaggacccgtgggccgccccagggacggaggggacccggagccgggcgcccgca

SEQ ID NO: 352 - DNA, 581 bp, Homo sapiens
agacccggcggaaaggagccgcggaggggaactgagtgccttcagccgggcatgttcggcgagatcgcgatgttcggtgagatggcaatgttcggggagatcgcgattttcggggagaccgcgatgttcggggagatcgcgttgctcggagagagggcgatgttcggagaggccgcgatgttcggggagaccacgatgttcggggagacagcaccggtccttccagaaacctcctggcctgaggggcaagcagcagccgcaggaagcggacccggcggaaaggagccaccgaggggaactgagtgccttcagctgggcatgtctggggagatcacgatgttcggggagatcgcgatgttcggggagacagcgatgttcgggggcaccgcgatgttcggggagaccgcgacgttcggagggaccgcgacgttcggggagaccgcgatgttcgttcagggagatcgcgccggtccttccagaagcctcccctcctctgaaacccgctgcagtccacaacctcccaggtttggcccccgccctgcttaggctacatccccgaactcaccgacccatcctgcccg

SEQ ID NO: 353 - DNA, 656 bp, Homo sapiens
gtttttttcagctgcccggcgagagaacttgactctgaacgcagcgcgggctgcacgcagaacccccgggctgggccgcgcgccccgggctccctgcgcgcaccctcgggtcgcgcgtcccgcggctcccgcagctccctaggctctcccttctccctccctccctccctccctcctgccgggcgcggcggccaccccgacgggcggcgcgggcgcgggtacctgtagaatgccggcgggccggcctcgcgcaccgtgtagccgctgggctcgttctccaggtagtagggcacctgctggccgtggggctgcaggaaaggcgacagctgcggcggcgggtgcagtagcatcagcgggctcggagacacgctgttgagtggggggaaaccccccaggccgttggagccgaacgccgcagcctcagacccggggccgtaggggaggccggtctgaccgtagacctgcgcgttggcggcggccgcggcgttgaactcgtaggcggcgccctcggggtagttgtacacggcgggcttgctgctgtccaggtacacctcgcccaggggccgctccagggggatcttgagctgcggacggttcaggggctccagctcgttcccttggatctgatgcagtagggccatcccagatgctttggt

SEQ ID NO: 354 - DNA, 651 bp, Homo sapiens
tccaccccgcagaagagaaatttttttttaacgtcctgttgcttcacgggggactttcggggtgggcatcacgtggcccgacacgtagccgtggggctccagagcgcgtgcgcgcgtcgagcccggtcgccacgccccttccgagggtcgctccgcccccgtcgggccccgcgagcgcgcggtgggggaggggagggccccggagcgcgcctgcgtggggcgggggcggcagccgactaggggctgggtctggccgtttagggccgggtcttggcccgtcgcccacggtgcggagggctggtgggctttccttggccgtcgggcccgccacggcgcgggtcttggctgcggggcggaggtggggcgggagagccgaggataagagtttgaggcttttcgaggcgcgtgccgcggcgtccgcctctgcgggactctgcgccgggcgccctcggccggcgcgcccggctcccgctttgtcgccgagggaagcacgcgcgacgcccctcccgtcgccgccgtggcttctttcggtgttcgtgatttgctgagaggctggaaagcagcacggcggagaggagccttgcactcgccaggcgggaagcctgcgcggacacgcgtgcgcacccacggggcggcgggcgggcgtggggg

SEQ ID NO: 355 - DNA, 564 bp, Homo sapiens
tttaaactaacgagccccacactgacttccacttagtattgaacagctgcaccaactccccaaccacgaaaccccgctttagtcctcacgggaggggagagctcccgaacgcggggcggtgggggtccgcgcagagcaggctcgggaggccgagcggaggagcggggcccgcgccgggcacacgcgtcctccaggccggcggcgcggcgtgggcctgctctcgggagggctcggcgaggaccaccgagtccgcgcagcccccgccgacctctcggaaatgtgaccgccgaagctagaggggccgcagggctcaccccgcagccctccgcaacgcgccaacttggacgccagcggcgcggggtcccggccgggcagggggcgtccggcaccggcgggtccaccccggcccgcccgcccgccgcaagcccggcccggcacctcctttgtgcgccctcctggcctcccagtccccccggcgctcggtcccgcccggccgtgaccttcccgccctccccaccatcccaagcggggaaaggggccgccccggcgggggtcgggccgggg

SEQ ID NO: 356 - DNA, 495 bp, Homo sapiens
cgtgccaaggaagtggcgtcaacctgaggctctgggatcagacccaccggactcacgccggctctgccacgtgttgcccgcagtctccgcccgttccctccgcgttggcaacgggcactgactgcccgatacctcagcgatcgtagagactttcctaatgccgggcgcaccaccggcgggccagcggttccgttggcttccctgacacacttcctacagtcatttctttcagctgagatcttcccctttaatacctcgttaattaacgtgtaaccttttggttaaaatgtcagagctaagactaaacctgaagaaaagaatgaaaccacaggaagttcttcagacttagtcgccagcaaggttatggcccgaagcggtgcaggggcggcgcgccgggaagctactggcagagctgtgcgcactggggggtgctgcaagcgctggggagagtgtggagaggctgcgtggagctgcgcgctcggggtgggagctgca

SEQ ID NO: 357 - DNA, 710 bp, Homo sapiens
gaggcggtggcagcgcgtccctgctccgcgccccgtgcggggctcctgctgccgacagctgctgctctgacagaggcggcggcggcgacagcacagagcacggaggggacccggcgagccagtccacatgctgctctgacgaggtggctgctcaaccgcgggccagcgatatatttatttaaggacaacttccagggtccaccagggaatcaggaattcccccgcccctttcctcccgccccctgccttcgcgcctggcgcctgcccgggggatgctcaggcgcgggtacccatcgtccggccgggggcgtcctgggctgctggctgcagtgtgaagatccagcagcagccgccgccaccgccgctgctttgtggggagagtggcggggagtccttgggagcgccaaagcgctgcccccgctgcagtcgggagagggcggaggaggagacgggcgggccggggtgaggacagggagttggggacgcggcgacctgtgcttgaggagggcagttagcgcctctgctgggagctgtgggctcggggctgcccaggaggctcaggtgtgctgtggggcgaggccaggaggtgacagctgccgctgcagccgcggggggctctcggggctgcaggacccgcctctcccacctcccggcctcagccgcccagccccccggttcttctgccctatctctgagccaactttctactg

SEQ ID NO: 358 - DNA, 586 bp, Homo sapiens
tactgctcgtaggagcacggaggtgcacccccgcatgcaaacctctaaggctccccgagctcctgcccaccctggggacccagcccaggtctcccagcacagggccggaccgggtgccgcgaagcagccgccgccttccacctgaatcccgccgcccgggtggtcccgcgaaaactcacccagcacggtcagcctgctgccggccccgaaagtcaggacgttggccccagagcacagcccggggactccccgcaaaaaccagacccaagccgcccgcgcccgcgccccagcagcccgcgctcaccgagcaccaggagccgcgtgcctggcccgaagtactgggtctcttggtcacggcccccgagccccgcacaaaaacccgagcgcagtctcgtccccggtcccccggcggccccagcttacccagcactgagagccgggtcccggcgccgaagtactgaatgtttttggctcacagccccgagacgcggcacagaaactggccctgcgacgcccccggcgtcccggggcgccccctccccagttccggggcttcagcgggagcccccgcttaccgagcactgtc

SEQ ID NO: 359 - DNA, 466 bp, Homo sapiens
ccgccgggcgctccgggagggctcaggccgaccccggggtccattagaggcgccccaggccgagggagcccgcggcggctggaaggtgaacttgacatcccggctccaccgaccccgcagcggctcgcacctcatccccactccggccagaccaaagtagaatcctgggtgtgcgcgtgatttcccagggagggcggactcggggctttccctgtcgcaccctccattgggggaccgcccccaagtccccgagagcccctcgggcagagtccttagggctcagagcatgggaggacctggcttgcctggtggaggcgagtagccgaggggtcggtggagctgcgccccaaatgagttcccggcgcgcgattctccccgaccccgaccctttgtccgcctccccctccctcgtcccggcccttggctcaggggacccaggcggcggcggcggaggtggcagaggcca

SEQ ID NO: 360 - DNA, 587 bp, Homo sapiens
gtgggtgggcggcagctcccgagccggggaccccggctggctcctgtgcggcgtgacggggtggttggctgagccctaggccccctccgcctgccgcaggctgggctggcgctgcggacccaagtgcagctcttccccgcggggcacgggcgcaggcggcgtccccagggaggcgtgcgcgggagcgccggggatgggggacgggcggggctggagcggggacctacttccttttctgtcccaagaggactcaaaggaaaacaattcacttgatcctggatacgttttcatctataattcggaaatatgcaaatgaaaggcccacatggtctgaaaggggcaaatcaagctcccagcgtgcggcgcggggaaccggctcttccccagggagccccggaggcgcgcgccccacgccgagggcgcccggggaggaaccgcaccccgggctcgggagtagcgcgtccgggccctcagcggccaccgcccgggggctccccaagcccggtccttgccctctgccgcccgccctctaggccgagcctccgctcccgcgatgtcgccgcgctcgccgccgccaggcgcgctgg

SEQ ID NO: 361 - DNA, 459 bp, Homo sapiens
ttcccgcctcagctgggcaccggcctggaagcggcctggaatcagactggactcgaggaggtaagacctcggcagcgcgaggttaaccacaggcctcacccgcggcctccagcccggccccaccgcagccggcggcagacaccccaaactctccacacgccgccctcagcgaggcgcctcggggaaagcagcgtgaggcagtgagccgaggggcggggccaggaggacgccccgcccccgagcccgccccgccggagggtttgattaatgaccctctaagccgcctcagcccccggcgtagcctctccggtgggccaggtcctccgcccgacctgccttagccggtcggagcacacacgcctggccgcggggcgcccgcataaaagtcacagccagcggaggttggaaacagccgtcgacttgggcatcggccggacgaggatggagtgaccagcgcgg

SEQ ID NO: 362 - DNA, 524 bp, Homo sapiens
ctaaagtctgcgtcagaagaggttggggactgcgagaggagaggctggggcctgcaggggagcgcagcagcttttagcatcgatccaaactctaaagactcgtggcctttgcctgacctcgagggtcgggaatagacgcctgtctttgtggagagcgatacccaaccgagaaaatggggctgttccgagctgggccctgcgcctggcccagggcgaggcttctctggctccgggctggcccctgaggggcgcaaacggcaggcctggcggttggggccgaggagggagggtaccaccgccccgaggcagcacgcagcctgcagcagaggcgcctgctccaagctgtctcttgggggcgccgccgccgcttccctcctccggggccgctcgctcccaggaaagtggaggcggctggcgaggaccgagagccggggccgcgctgcggagggaccacacctccgggagttcgagggggaccctggcgcggcgggccagcctttgctccccggccacgggccggcagc

SEQ ID NO: 363 - DNA, 530 bp, Homo sapiens
acccgccgagggcgaagaagttgggagtgacttcaggggcctctgcggctagaccaaaccgcaattctcggtgcccccattcccgcggaccgcggggtaacgccagcgagcagcgcttttctgaggaagggaagagggggaaagggtgaccggacgagcgcatttgtcccagcggatctccggtgtatacttggggactgggggttccccaggtggcgctcccctattccctgcgggctcctctcgtagcttcaaacaccctaaacggcgcgcgcatcctccgcctggcccactcaccgactccgccgacacgcaggccaccaagcccaaggtgagcaggatccacgcgcgccgcatattccccagggaccggctgctcccagccgctgcttgcaaccagggcaaaacgaagcctcctgcccagcgctcggcgcagcccgcgcacacgaatccggagcagagtaccgcagcgattgcggctcaggctcggggactcgggctcggggctcgggggcgctcgcttcctcctc

SEQ ID NO: 364 - DNA, 465 bp, Homo sapiens
tctcccgggccagccttctgccccccagatcgaggcgcaacaagtctgaaagcagcgccaaggagcagctagcgagccgaagggagggcgtggggcgccgggcgctccgggatccccgaacgcgcgcaacgtccgcctccggggaccgggcgcgggcggcaggcgagcgggactgactcggcgggctgcgcacacccccttccaaggccccgactgtgcgcggacgggggcgcgcccaggaacccccgccccctccttcgcctgcttgaccttgctgggtactcaaagccggactcggcggcaccccggcgtgcgggcgcagagtttcgctgccgcccacgggagggagcggctcgacctccctcgttgcctcctcggcagccggggtcgcagacgagtggaaggcatgagggttctaggagacgtgacagtcgcctccccagaccccacacaccgtataccacc

SEQ ID NO: 365 - DNA, 454 bp, Homo sapiens
gcgcaggccgctgaacagggccgacaaggctagcagcaggagcgccccgagcgcccgcagccacgcagggggcagcaggtccccgcctgggccgtacaaccgcgggcgaacgcgcagcaggaagccgccggcggcgccgtggtggtgccacgcgcgcccatcccaggcgcagagtgaaaagagcttcccgccaccgcccgcgccgccccgctccgcttcgcccttgcgcagctcccgcactcgcacctggaccagggccgagcctgccacgcccccgggacgcaagggccccaggacttccacgtccgatgcccagtcgctctgctccctgcagcgctgcggtcccggggggcgagtggggaccgcgctgggggccacgccgccaccgcccgggggctcctcgatgaacacgagccgcggagcccagtcgccggtgccattctcccccgagttg

SEQ ID NO: 366 - DNA, 380 bp, Homo sapiens
ggccggcccgcgcccagccagcagcccgtccgcgtccgcggtgctgcggttccccatggcgcgcccgggcgggcgctgagcaccgcggacaacgccgggtcgcaagccggggagtccctcccctcgggcacgccccggccggaccctggtcccgcccccgacccgccccggctcaggggggcccccgcggcgctccaccgtgagcccagtatttgctcatcttggaattttgcgcagggagagacgggcacgtggacgaatgcggcggcccaaagagacgggaatgaagcgaggtggtggccacgggcaggccagcatcgcccggcgccgcgcggggtccgcgacccgagaaaccgacaaggatggaggggcggccagac

SEQ ID NO: 367 - DNA, 357 bp, Homo sapiens
cgccgcccgccccacccccgcacatccatcctggctcttgggtttgtacaagcacaaacggctccttttcatttttaacgagggctggggaattaacgagcaggattagtccatcaataagtaaagagaccgtcaggagggacattcatcccctgagggcgccggtagggggagcggggctgagccgcccgccccgcatcgcgccgccccgcccagcccgcagcccacagctccccgagccgctgctccgcaagacctccactcccgtccccactcctgccgcccggcccagaagtgtggtgggactttgggggcagcagggggcgaggggggcgacggtgggcccgggggtgtccg

SEQ ID NO: 368 - DNA, 421 bp, Homo sapiens
agttcctttcccggagcgcagcgaggaagggacgcgaggggacgcggcgtagcgcgccgccgcccggagtctaacttttcggagcgcgcgtcctccgggccgtcagccgccggcgaggccacccgggaggggcgggagccgcctgccagccactcggcagccctcctggggctcccctcgcgcgcccgcttgtttttcttccgctgcgcttcctcgcttgctggcgtctttgccttagcgggactcggcagccaggggccccagggggcggtgcagcaaactctcagcggtttgcgttcagcagaccaggttggggagccggcttggcgctgcagggaggtagagagcgggaggaagaggcagtggtaggagggaaagggagagagagacagagagagagagagagagaggaagcgagaca

SEQ ID NO: 369 - DNA, 435 bp, Homo sapiens
cgggtgatggagccgacacggagttatgcagtctggagaagcagggatgggtaaacacaggctgacagtgggaagggccttgcctagcacgaccaggctcgttcctggacctcacctatgaaaaggatctcctgctgctccccactcgcactcacaaattacaggctccagttcgagctgaccccggcactcacgctgaagggactcttgggaaaataacacccgattttgcctttgcagccactgtcttcctcctccgacctgcagtgtcaaacctgtgccactctccgcccccacacacctctcgcaaggtctggcttcctgcgagcctggaacacaataggtggtgcggcctctgagggcccgggcagccacccgcacttccccgccacgcggagaaagccgagcacacaggccgcagggtgggggtccgcg

SEQ ID NO: 370 - DNA, 492 bp, Homo sapiens
cggcttgggggaataggtagggaaaagggttctttgggtcacccattttttctagtcccattactgactcttggagaatattcagatggtgccaggtagcaccatgcctattattattctcactgagacaaaagtcagcggctggtaactggtgtccattctttcgcttgagtgggttggagaaagacggcatggctggaggaatttgttttgttttgctttggagcgggcttcctcagttgcatcctgcatcgggcgggcacagccccgggctctgggaagacgccgctcggcagccgcagtggccgctgcatcaatgggttttggggcagggaggtgcggagcccagcctgcgctcctggctacccctccgcgccccgccgccgcccacagcctacccttctcctctgcagccggtaggcggccgtaacacgggcgggccgagcacgtgggcgcctccgtcacaccctcacacatacacacacgcgcgcg

SEQ ID NO: 371 - DNA, 450 bp, Homo sapiens
ggggaggacgcgccgccgccgccgccgctgccgccagggcaggcgcgcgccgcgtggagccgggcgggtgcgagggcgcgcggcggggggtggggggcacgcgccgcgcggggggcgggggcagtggggggcgcgcgcgcgggcccggggagctcgcggggagagcccggcgctcggcgcagcgcggcgcggccaagctccgcgcctctcccgcccttcctcggcgcgctcgccctcgcctcgccgctcgcattcgctgggggcgcccagaaagatgcacagaggcaacggctaggggagcggaggttcaagccacatgtctgcgtcctcgggggccagagcccgccagccctcgcggatcccggctcgcggccagcccgagcggctcgggtgagtagcggcacagcggccccctcgctccgcggcccccgctcgccgagacgtggctcc

SEQ ID NO: 372 - DNA, 448 bp, Homo sapiens
ccgagactctccgcctggggggcgccctccttggctcccggagccttcccttcccccggggccctcgccctgccggggggatgccgggtgcgctggggtgcgccgggaagcacggggatgcgcggcgctgcaggcgcggcccagggcccctcgggggtcgcgtcgcggagggggcgaagccaggagctggatcgtctctgcctcccgccctgggggtaacagccccgcttccccagcccagacgtccccgagccgctcgcgggcccccagcgggagccgggggtggggtccctaagcacccgcgttctcaccgcctctcttcgtctccggctccggctccggctcgcgctccagcaccgccgcctcctgggctccccccggagtgggagggagccgcggtcccgcctccgcgcccgttccctcccaggcccctcggccgccgcgccga

SEQ ID NO: 373 - DNA, 393 bp, Homo sapiens
cccgtgcggccagcgcgccgcgtcggcggatcctgcagcccagagagcccagggagcccagggaggggagcggggcgcgggcggggcagtgtcgcataaccgcaggcgcgccccgcgccgcccccgccccgggcccaccctccctcgccgcgcccctcccagctcacccacggacgagcggatcctcgacctccgcggcagggacatcttaagagctttgtccaggcctgcgccgttcagcatctcgcccgtgtcgggggctcggcggccccgggcgagagacggaggctacgcgcagggctgggcgcaggggccgccgcccgaggaccatgggtgggccagcgcctcgccgggctgctagctggcggggaccgccggcgcctgtgccgggcc

SEQ ID NO: 374 - DNA, 367 bp, Homo sapiens
tcgggaggagaaactgaggcccagagagcctccgcgatgtcagttacgttctgcaggccgggcctttcccaggccaccatagcggctggcggagggagcgcgcgccttgctggcctggagggggcgggggccgtggcggctttaaagcgcccagcccaggcgtcgcggggtggggcggctctggcggctgcggggcgcagggcgcagcggccaagcggggtccccggaagcacagctggggtgtctccacctacgactggccgcgcgccttttctctcccgcgccagggaaggagcggctgcggcccccgccgggcggaggcacggggggcgtacgaggggcggaggggaccgcgtcgcggaggaga

SEQ ID NO: 375 - DNA, 519 bp, Homo sapiens
gccctggctggcccggggctggcccctgcggctgcccgggctgttggaggagggagaggtggcggcctggccggcgcgcacttgctgtttccattctcagcggacccgcgctggggtggccgccggcggcagcggtctttcgggctcaccctcaggtttaaccagaaatccgggagtagctgagagagcttcggagctccgtgcactgtgcgctgtcctgacttgccaaaaaagaaagcagaaaaacacccaaagcacgttcgagaagagaagggggaaatctggggtctgcccttcctttagaaaagccgaggttcagggtgagagcccctctgagcggtccttggttgagctagcggagcggggaggctcccggcgcccctgcgatgagaccccaccctcacgccggctgcgccccgggacctccgcgaggattcgtccggcgggcgcgcgagcgagcggggtctcttcgggtttcaagcggccccggggccggcgcctcgtgaccctgccggactc

SEQ ID NO: 376 - DNA, 459 bp, Homo sapiens
ggggtcgcggcccggagcaggctggggctcgccgggaccgcggccagagcgcgccaagtgcgcaggacgcggggctggggctctggcgtgcgcccctcgccgcgcaccagtgcctacttttccacgcaccgcccgggatggccgcccccagacggccccggcccgcggccacccccgccatccccgcgcaggctctacgccgctccagctgccctccgaggccttcaagaaaacttgggcgccgccctccgaccgcagccccagccagagcttcccgagcgcggggcagccgcgggccgcccccacccggccgcgactcgggatccgcgggtggcacttacctccccgaggcgccggcggcagcgggaggcgagctctccgcggctcccgttcgagtgcgcggggcacggaggagcgcgcgcctttaagactcttccccgagactccgccaggtggtgt

SEQ ID NO: 377 - DNA, 384 bp, Homo sapiens
gctgacggagacgccacaccgcgccaggggagcaggagctttttcggagcgggaggcggggcgccgtgtggctgcgagcgcgcctcttggatgccccggccggcgcgggggtgggtgggcgctcccgccccatccttggccccgggcggccagccgcggtgtgcccggagggctctgcgagggctgtgggtggcgggcgagccccagcggcgtagcagaggaggggcccccgagcgagcgtactagggagaagggggtccgtgcaaatcccaggctgacgaccgcgcacgcgcccctcgggtcaccagccctgtcgctcttggtggggcacaccgaggagaccgccgtggggaaccggggaccggattgcctgacagccgagcg

SEQ ID NO: 378 - DNA, 545 bp, Homo sapiens
gggcacccgcctagcggctccctacgggagttggggcagaagacgccgcgaccccgcgcgggtaatttctcccgaggcgcgttccagcccgtggcgctgccggcgcagaccccgcgtggggaccggcgaggctaacccctcctgcggcccggggtcggcagagcacgcaaggggccgcgggccgcgtgggtttgggcgcgccgtggtgggcaagcggggccagcggagcgggaacccgcacaccctccgagcggagccgaggacaggcccgtgcgggccgcggggtccctctggcgccaggaagcggcggccgaaggagacaacgagaacgcagccccggctcagggaggcttaaaagctgagatgctgaacgcagacggcgggcgctcgggggctggggggcgggtagaggccgccatttctcaaaaaggtctccatcgagccggcctctgctcccgcccgaggggcggacgcccgatcccggcacccgggactgcccgtgggtccctgctggctggggacccccagcccccggctgcgcgcag

SEQ ID NO: 379 - DNA, 291 bp, Homo sapiens
aacgacccggcagccgaggcagcgccgcgccccacgcccgtcaccgtcgccgccgccctagcacaccgcaggcgtgagtctcgccgcgaccgggagagccctcccagctgtgcgctctcgaggcacctggtcgggcggggaggcgtcgggtcggggcgcacaggggccaggcgggggcgctgctgcccacttcccgcctcccgggcgtgcgctccgccccggagcccgcacctcgcgcccgcgctccgcctggaagccttggggcaccggacgcgctcctccacccttctc

SEQ ID NO: 380 - DNA, 492 bp, Homo sapiens
tgggtcagccccgtaatcctcgcctgtctcttgtctcctctttcctccccgagccgcggggctcccggggcgcgcggacccccgccaggggccgtgtaggcgcggagccccagccggcctgccttgggtccgaagaaagttgtggcttggagctagtcctccttctacgacccctgggggcgtccttccttctttttgagcccgcgatgggaaggcgctcccaccccatccccggggtctctgagacttcctggcgaggtggggcggcgcggcaggtgcagggctggggagggcctgacagccctggagagtgcccgaccccagtccgccgccgtcttctaggcggattccccagaggcaggtcccagtccccggcgcggggaggcggcgcgcttcagaggggcgcagggtgcgcgggggccgttggccctccgggcacttcccctttgcggtctccccgccctccttcggagctggtgcctgaggtcgctg

SEQ ID NO: 381 - DNA, 381 bp, Homo sapiens
ccctcaggactcaagctccaagtccccggagccctcggccgacgagtcaccggacaatgacaaggagaccccgggcggcgggggggacgccggcaagaagcgaaagcggcgagtgcttttctccaaggcgcagacctacgagctggagcggcgctttcggcagcagcggtacctgtcggcgcccgagcgcgaacacctggccagcctcatccgcctcacgcccacgcaggtcaagatctggttccagaaccaccgctacaagatgaagcgcgcccgggccgagaaaggtatggaggtgacgcccctgccctcgccgcgccgggtggccgtgcccgtcttggtcagggacggcaaaccatgtcacgcgctcaaagcccagga

SEQ ID NO: 382 - DNA, 430 bp, Homo sapiens
gaccccttcctgggcattttctctgccggctcagctccccctcccgccctgcgaccccgtgtctcccaagtctcgtcgcggcgaccacccggacttaccgcgggcgccacgccgccgccgggtctgcgcgctccgaggcggagccaggactaggacacccgccagcgcagggcagcctccagctcccgccgccagctcgcggcccctgccgcgaccccgcccactgcgggcccctccgcccgcccccgcggccgggaggtctggacttacctccgggacaaggtgacccggcaagtgcgcccaagcggccgcccgcgactctcccgagcgagcgagcgtgcggggcggtgcggcgcccgcctctgctcctccgctgccaggctctctcctcctctgccctcccctcagcgccgctctgctccccacgcct

SEQ ID NO: 383 - DNA, 643 bp, Homo sapiens
caggtggagcagcttaagcaggaggtgtcccggctggcccgcgagagagacgcctacaaggtcaagtgcgagaaactcgccaactccggcttcagggaggcgggctccaccagcgacagcccctcctctcccgagttctttctgtgagtcgtggccggtcctggcccccgcccttgccccggcccggactccctgtcccacgtccctagtcccagactaccccggaccctgtccctgccgcggccccagccttgacctgtttgacttgagcgagagggaggaagggcgcgcgggccgcgggcgacgggcgggtgcgcgggcgggcaggggaccttggctaaggcgagagtagcgcacgccagcgccgcctcctagactcgagcagagccggagagagagacgagagggtgggaggtcccggagtaacttctctccaggctgaagggcggcgaggcatagtcccgagaagtcaccaaggccatctggagactcctggctttctgaactttgcgcgttaagccgggacagctgctttgctgcccggagagtagtccgcgccaggaagagagcaacgaggaaaggagagggactctggcgtcccggcaggcgagaggcgaggctgagcgaaagaaggaaggacaga

SEQ ID NO: 384 - DNA, 458 bp, Homo sapiens
gtgcggaggtggccccgcaggtggcgggggagccgggtgagtagcgccgctggagccccgcccgggggctgggggccggtgctcagaggttctccggacccgcgcgggtacgaggaccgggcaggggacctgaaagggcgggcgaagcgtccggcgcagagtcctgggactcggacctgggcgtccccgccccccgcctttgtaaattacactctcctggagtccaccgtccccttccccgcctggattcctctagccactcctctcaagagctagtcaacgagtttgcctcccaaacacgctggaaggatgctcagaggacccctcagaggctgttttcgggatgcgcgggcacccgagtctccggcctccttggcactgggcttcggctgcgcgcctggaaggtggcttcttgccttggggttacgtttcaaatgcgttgtccagggaaggcctca

SEQ ID NO: 385 - DNA, 452 bp, Homo sapiens
gcaggcgcggatagagtgcgcggcgcgggaaatgcgcacctcccccgcccccgggaccctcccttccacgccctcgggacaaagacctccgagcgggcggcgctcggaaagcagggcccgccaccctgcgccgccctgggaagtgaagagggagcgcgcgcacagggcggccctccctgctggccgggcccagccgaggggagtaataagtgggggcgccctgcactgccaagggcagtgttctcgcacgtcggggcgcagagggggcatgaagaaccctggaaattgggcagccttgcccgcgcacgttccctcgcccctgggcggcccgactcagtttctaaaggatgcgtccccatctgcccaggggtctcggggcgccgggaacctggaggaacatggcgctgtcgcctcctggcggaagcgcccgggcctgcgggcaggggcagccc

SEQ ID NO: 386 - DNA, 440 bp, Homo sapiens
gcgctggaagaaaaacttcccgcgcgccggcagaactgcagcgcctccttttagtgactccgggagcttcggctgtagccggctctgcgcgcccttccaacgaataatagaaattgttaattttaacaatccagagcaggccaacgaggctttgctctcccgacccgaactaaaggtccctcgctccgtgcgctgctacgagcggtgtctcctggggctccaatgcagcgagctgtgcccgaggggttcggaaggcgcaagctgggcagcgacatggggaacgcggagcgggctccggggtctcggagctttgggccagtacccacgctgctgctgctcgccgcggcgctactggccgtgtcggacgcactcgggcgcccctccgaggaggacgaggagctagtggtgccggagctggagcgcgccccgggacacgggac

SEQ ID NO: 387 - DNA, 439 bp, Homo sapiens
cgggaggaaagagggtgcttcctccccctggggagccggctctccgtgtactctctgccctcgctgttgggaacgcctggcaggccctgaggtctcactgggcctcagtctccccaacagcacaacggagggggctctccaggctttcagtcccagctcccccggttgcccatgggggtcccgccggcggtggagggaagcctcgccagggggcgctgaaggcccgcaggttctgcgaccgccctccctcgcagggcgccgccctcgcctcgcccaccctgcctcgcgctaggcgccgaaggggtagccaggtaggaagacacccgctaccgcctgcttcagtgtccggatctaaagggaagaaaccaaggtccccaggacacccagctgagtggcggaggtcgaactcgaactcgggaccgaggcagagggcgtcccg

SEQ ID NO: 388 - DNA, 396 bp, Homo sapiens
gggagatgctggcgtccgccgcagcctctcgccccatcccgggctccggcggcagcggctgcggcgggcgcccggcatcgcaggcagcgcggccccggcccggccccgatcccctccccccacccccacttccaccccgtcccggggacccggcgcggccgctcggctgcaccccggggcggcggcgggggcccggcgagcggacgggcgcgggggagggaccgcggcgggcgcgcggggggcgcggaggcgaggccgagcgcggcgcgcaggggtgcccgctcccgccggctcaagcggctccggcccccaccccgccccctccgcaaccccctcccctcccccgccagccgggctccgccgccgcgccgggccgggggcgcctcgcaccgcaga

SEQ ID NO: 389 - DNA, 418 bp, Homo sapiens
gaaatgagaagccctccgagcacaagcgctccctgagggtgggccacctctccggctcctagtcttccacaatcgtcggctacaaactgtagcctgggaacgctccagccgtatttcagctcgccttcggggatcgccgcctccgaagcgcaacaacaagcaatgcagtctgtccacctaccttcgcacagactctcagcccctcccgcctctcagcagaaacgcccaacagaaccgttaggaccagcgagcacgcgcaccttagccggccccgcccaacaggcccgaggcggagaaaccgccctagcagctctctcgccccgccacgtgcaggcggcggttgctgcggaggcgcagcgggctggcgtggctccctggagcgcgaggcgcgccctgccccaaggcctgtatgactgtc

SEQ ID NO: 390 - DNA, 363 bp, Homo sapiens
acgcggacctggagcgcggtcactgcgttaccgcagcgacctgggttacctaagccggcgggactgagaggccgctgcgcgtgggcaggggctcagattgcgcccgcggtgcctgtcccggcccccaccccggaacgattgcagccctgcggggctcgccgcccacaccgcgctgaggacgctgcccaagccaggcgcccgcccccgcccgcggtctcagccgctcgcagcgcgccgcccccagacgcgcgtggctgctggcgagggctgagaccgcgctcccgccggccagttcccagcagcagcgcatcctccctgctccgcgccttcgctccggacccgcgtcgtcgcagccccgcggtg

SEQ ID NO: 391 - DNA, 371 bp, Homo sapiens
gcggccgtcatcgccggcggcccgcgctggcgctcgcttcctcgcgggcgcttcagactcggggaccgtcacttggcagcgttcgcaggtcacgggcgcccgtcgctcccggaatcggcggaagggacggggtggggggagcggaggggcggggaggggaagaagagcggcaccgggcgggctccccgtcgtagggtccctccctcggccaccgcagaccctctgactccccgctctccccgccccccgccacccaaagcgcagcgagccgcggcggcgaggcgagaccaagcggcaagttagtgcagcggcgagcggcggggccccggcccctgaccgagctgcggcgacgcctcgtgccttcttcccgc

SEQ ID NO: 392 - DNA, 397 bp, Homo sapiens
gtaaacacgcgcagctggaccgggctgcgggctctggctgagtggtgctggtctgcgccctggcgctgcgcccggggcgcgcgtaccttccacgaggatgcgcgccgagtcggagcactggccgaaggggttggtgacgttgatgctgtactggcccaggtctgccagctcgccgtcgcgcaccaccagtgccaccacgtcagggtcctcgaagacgtagcggtacttgggaccgtcacgtagctccttgccgtccttactccagcggatgaatgggtccgggaaagccgaaatgcggcaagtgagcttggccgcgctgccttcgatcagcaccacgtccttcagcggctccagcacccgcggcggccccttctcgcgcagctccttccgggaccta

SEQ ID NO: 393 - DNA, 366 bp, Homo sapiens
ccagcccctttccagccggctggtgggcggctgggagtggggacactggatcggaggggacccttcacgggagtactcgctgccctcactcgtctcggaacgcggctggacccggagtccccgaccgcagcccgcgcacgacccccgggagcctgtctccgcggccgccgacccacgtccgcgctgccgccccactgccaggtggcccgagagatgcaggaggaaggaggggcgcgcggggcgggcggaggagggtggagccgccggcgcgccccctccctcgggccggcaggcgggcggcgcggcgggctcggcgcggcggcagaggaggcggcgggcgctgggagacaccggacgcccgctcgg

SEQ ID NO: 394 - DNA, 907 bp, Homo sapiens
gctcagttccgccagtctccggttggtggccgtgagttcggctcgcaggttggtcacctcctggctggccgactggaccgccccatcgatgcggagcgcgagctgcttattgtcttccatcatgctcaggattttggcctgggggcgagagaggtgacaaagagctgcatgatgcgcggggggcgcgcggccgggcacccccggctctacctgttgtgtcctccgcggcccggcttcgcccgcgccccgacccccaggcaccggcagcgccggttcctccggcacaggaatgacagcggcgcctccagccctagccgcggcggtggcgaggcggcggggggaggaggcggaggagaaaaaagaggaggagaaggaggaggaggagcagcgatcgccgagaccccggcgggcgggcgccgagagctgctccaagaaggacaccgcgcgccaccaggcactctttaaatggagcctaccattcgccgccggctcgggagggggtctcggtcggaggctgggggcacccttggcctcccgcgcccccgtacttcggagacacaccccccgggggggcggaggcggcggacggcagtcgggagggggccaaggtggcgcccctggcgaggggcaggggtcgcctggaccgaggccggccctctgtcccctcccttgagcggtggggcagcccccgccctggagaactggtgccccgagccgtgctaaggttggggaggtgctgggtgctcggaagagagggtgcttggaaagggggcctcagaggggagccggggtggatctccatggaagggagacgcttgcgccagctcaggagtggagttcgtgctccaccggttccttaaactgcgagtacgaaatccccagaggggagctgagctggtgccccgcg

SEQ ID NO: 395 - DNA, 562 bp, Homo sapiens
tgcaagtccgctcccggccacgcgcgcccctcgggccctggtttcgcacccctgccgccgcccccacgcgccctcacggaccccgcgcgccccctctccccggaccgcgagcgcacccaccgaccccgactgccccggctcgctccgaagcctccgcgctgcagttctcagctccaggagcagggctcttgggtttacgtctccaaggcaaccattcttcaggctggctgtgacgccacaaaggccgcggaggctgggcgcttgagggctgggcctgcgggccgcgggacagggagggcgcggggccgggctgctgggtccgagctctgggcacgatgtcctccctgacgccgccaggacagcgcctggcccaggcctgggcctggtgaacgcgggtttcttcctctgaggttcaacactccgcacttgggttggctcctttcatcctgattggtttattcgccacgtgccaagcactgaagagggcgtgcaggatggatacttttggagcaaaaatagccctgcttctttcctggggagggatcgcactttctagaggggc

SEQ ID NO: 396 - DNA, 563 bp, Homo sapiens
cctgggggcgggcaagggacagggaggttgtcgggaccacggatgggtagccacggtggagcgccggcgacgcgcggaggagctcagcccgagtggggctcgtctgcactggcgccgtcggcctggcgggacgagtccccggcggtggcggaggtggcgtcagggcccccgccctcgatggagctctcgctgcccgtgctgtcgcctgacagcaggcgcgtcacccgcaagtcggcctgcagggtgcgcacgtcgttgccgaagctgagctcgcccaggtcgctaataagttgcgacagctcagccttcatgtcggaggcgctgcccagcagcagaggcggcggcccggcccccgggcccagggagcccccgccgcctcctagcgcctccccacggccattctccagagtatccaacaagtccccgcactcaaagtgcatggcgaccactagcgcacgctgcgcctcggcctcctcctctgctggatctccctctgccgcacggttctcctcctcctccgggcagccctcgggttgctcctcttcctcttcctcctgcagctc

SEQ ID NO: 397 - DNA, 509 bp, Homo sapiens
cagtccgggttgtagccgcgcgcggagcccgagggggccgagcaccgtgcaggggcggggacggcgtcccccttctcctggacgcccttccgactgcgctcgcagggaccccgctctcgccgcgccttccgccgtgccccgcctcgggctgcgctcgcagctccttactccagtgcccgcccgggaacccgggagctcctcgcgccggggccaacgtgcggcgctcctcgccggctacagcgggcgggagacgcgaggcggcgcgggagcaggggaaggaggggaaggagcgggggaggaggggacggacgaaggcagcacgcagtgggcggcggcagggcggaaggagctgagaaagggatcggcccggaagaatctgaatccctgctcggccctcctccctcggccgggagctcggtccctgcaggcagtaagcggtttgtcagcacccactatggccaggcctcggctacgcgctttgttagcaccatcccacatccgcctccgac

SEQ ID NO: 398 - DNA, 442 bp, Homo sapiens
ccagaagggaatttaaaccatggcagcgtccagaggcaccggccccagccccactggatgtgtgtgggtcgaggtcttcgggtaagggcgagattctcgccgtgtgggggtcctcgaacgcgcctctccgactcgggcaccagcgaagtgtctaagaagtgccactggctacctacgctcagcagccccacgctgggtgcagcgccccagccctttccaaccctcccgtgccgccctccggctaggttggctggccgtgggcgcctcaccttcaggaagtcgccgccctgacagtcgatggagacctggtcgtagtggatggtaatgaactcctcgggctcgctgatgaagaaggctgcgcagtgcagctgcggccggtcggcggtgaaggtgaactggccctggaggctcagcatgtccaggcaccctgggggaggagggc

SEQ ID NO: 399 - DNA, 441 bp, Homo sapiens
accgccgccgccaccgagcgtggccgcgcgggtgcccagcagtagcaggccgtcgcccctggcggctgccgagttcagcagcaccctgccccggccggactccacatccttcatgccgctgcccaagcgccccccgcccgccgccgccgccgctgcgccgctcttcacccagagcccggcggcgccgccctcctctcctcccgcgtggtggcggggcatggcatcaccacgggcaccgcgagggggccgccagcgcctgcggcgggggcagcggcctcatgtgcgccggcgggtttcaaggaggaagccggcggccgacggggcgcccgccagccagagacctctgagccgggggcggggaagcaggcagccagcaaaccgcccgggcttcggggcgggaaaggaggggctgcagaggaggccgaggagtcccaatttcta

SEQ ID NO: 400 - DNA, 410 bp, Homo sapiens
gggacaagcgggcagcatgctcagggcggtcgggagcctactgcgccttggccgcgggctaacagtccgctgcggccccggggcgcctctcgaggccacgcgacggcccgcaccggctcttccgccccggggtctcccctgctactccagcggcggggcccccagcaattctgggccccaaggtcacggtgagccagggctccgacggggaggtcctgggagggaggaggttgcgggagggcagcgaggggccggcccgggagtcggcttgagggcgcgctgatcctctgtgccggtgcgtcagttcccgcgtccatctgggttgctttcgctgcaggggagattcaccgagtccccacgcagcgcaggccttcgcagttcgacaagaaaatcctgctgtggacagggcg

SEQ ID NO: 401 - DNA, 424 bp, Artificial Sequence
  Description of Artificial Sequence: Synthetic polynucleotide
tgygggygttyggtttygggtttttttygtttttggggyggtttaygggttttttgggayggggttgyggtyggaggagattgaggagatygggygaygaygygtttygygggygtagagaggtygyggtagttttgtttyggygtagggagttttggagtggtggagttgtagttggttygaggygggagttyggggagaggyggggtttttygtatttagttattttgtatgtgtgttygtatttatattttttataygygtgtygttttatttttttttttttttygtatttyggttttgygatygggggtyggggggaygyggggattyggttagggttgaggagggaggygyggggttgtagagatggygtggaagttttgggtttygtgttgtttttygtttygtttygttygggggt

SEQ ID NO: 402 - DNA, 581 bp, Artificial Sequence
  Description of Artificial Sequence: Synthetic polynucleotide
ygggtaggatgggtyggtgagttyggggatgtagtttaagtagggygggggttaaatttgggaggttgtggattgtagygggttttagaggaggggaggtttttggaaggatyggygygatttttttgaaygaatatygyggttttttygaaygtygyggttttttygaaygtygyggttttttygaatatygyggtgttttygaatatygttgttttttygaatatygygattttttygaatatygtgatttttttagatatgtttagttgaaggtatttagtttttttyggtggttttttttygtygggttygttttttgyggttgttgtttgttttttaggttaggaggtttttggaaggatyggtgttgttttttygaatatygtggttttttygaatatygyggttttttygaatatygtttttttttygagtaaygygattttttygaatatygyggttttttygaaaatygygattttttygaatattgttattttatygaatatygygatttygtygaatatgttyggttgaaggtatttagttttttttygyggttttttttygtygggttt

SEQ ID NO: 403 - DNA, 656 bp, Artificial Sequence
  Description of Artificial Sequence: Synthetic polynucleotide
attaaagtatttgggatggttttattgtattagatttaagggaaygagttggagtttttgaatygttygtagtttaagatttttttggagyggtttttgggygaggtgtatttggatagtagtaagttygtygtgtataattatttygagggygtygtttaygagtttaaygtygyggtygtygttaaygygtaggtttayggttagatyggttttttttayggtttygggtttgaggttgyggygttyggttttaayggtttggggggtttttttttatttaatagygtgttttygagttygttgatgttattgtattygtygtygtagttgtygttttttttgtagttttayggttagtaggtgttttattatttggagaaygagtttagyggttatayggtgygygaggtyggttygtyggtattttataggtattygygttygygtygttygtyggggtggtygtygygttyggtaggagggagggagggagggagggagaagggagagtttagggagttgygggagtygygggaygygygattygagggtgygygtagggagttyggggygygyggtttagttygggggttttgygtgtagttygygttgygtttagagttaagttttttygtygggtagttgaaaaaaat

SEQ ID NO: 404 - DNA, 651 bp, Artificial Sequence
  Description of Artificial Sequence: Synthetic polynucleotide
tttttaygttygttygtygtttygtgggtgygtaygygtgttygygtaggtttttygtttggygagtgtaaggttttttttygtygtgttgttttttagttttttagtaaattaygaatatygaaagaagttayggyggygaygggaggggygtygygygtgtttttttyggygataaagygggagtygggygygtyggtygagggygttyggygtagagtttygtagaggyggaygtygyggtaygygtttygaaaagttttaaatttttattttyggttttttygttttattttygtttygtagttaagattygygtygtggygggttygayggttaaggaaagtttattagtttttygtatygtgggygaygggttaagattyggttttaaayggttagatttagtttttagtyggttgtygttttygttttaygtaggygygtttyggggttttttttttttttatygygygttygyggggttygaygggggyggagygattttyggaaggggygtggygatygggttygaygygygtaygygttttggagttttayggttaygtgtygggttaygtgatgtttatttygaaagtttttygtgaagtaataggaygttaaaaaaaaattttttttttgyggggtgga

SEQ ID NO: 405 - DNA, 564 bp, Artificial Sequence
  Description of Artificial Sequence: Synthetic polynucleotide
tttyggttygattttygtyggggyggttttttttttygtttgggatggtggggagggygggaaggttayggtygggygggatygagygtyggggggattgggaggttaggagggygtataaaggaggtgtygggtygggtttgyggygggygggygggtyggggtggattygtyggtgtyggaygttttttgttyggtygggatttygygtygttggygtttaagttggygygttgyggagggttgyggggtgagttttgyggtttttttagtttyggyggttatattttygagaggtyggygggggttgygyggattyggtggttttygtygagttttttygagagtaggtttaygtygygtygtyggtttggaggaygygtgtgttyggygygggtttygttttttygttyggtttttygagtttgttttgygyggatttttatygtttygygttygggagtttttttttttygtgaggattaaagyggggtttygtggttggggagttggtgtagttgtttaatattaagtggaagttagtgtggggttygttagtttaaa

SEQ ID NO: 406 - DNA, 495 bp, Artificial Sequence
  Description of Artificial Sequence: Synthetic polynucleotide
tgtagtttttatttygagygygtagttttaygtagtttttttatattttttttagygtttgtagtattttttagtgygtatagttttgttagtagtttttyggygygtygtttttgtatygtttygggttataattttgttggygattaagtttgaagaattttttgtggttttatttttttttttaggtttagttttagttttgatattttaattaaaaggttataygttaattaaygaggtattaaaggggaagattttagttgaaagaaatgattgtaggaagtgtgttagggaagttaayggaatygttggttygtyggtggtgygttyggtattaggaaagtttttaygatygttgaggtatygggtagttagtgttygttgttaaygyggagggaaygggyggagattgygggtaataygtggtagagtyggygtgagttyggtgggtttgattttagagttttaggttgaygttatttttttggtayg

SEQ ID NO: 407 - DNA, 710 bp, Artificial Sequence
  Description of Artificial Sequence: Synthetic polynucleotide
tagtagaaagttggtttagagatagggtagaagaatyggggggttgggyggttgaggtygggaggtgggagaggygggttttgtagtttygagagtttttygyggttgtagyggtagttgttattttttggtttygttttatagtatatttgagttttttgggtagtttygagtttatagtttttagtagaggygttaattgttttttttaagtataggtygtygygtttttaattttttgtttttatttyggttygttygttttttttttygttttttttygattgtagygggggtagygttttggygtttttaaggatttttygttattttttttataaagtagyggyggtggyggyggttgttgttggatttttatattgtagttagtagtttaggaygttttyggtyggaygatgggtattygygtttgagtatttttygggtaggygttaggygygaaggtagggggygggaggaaaggggygggggaatttttgattttttggtggattttggaagttgtttttaaataaatatatygttggttygyggttgagtagttatttygttagagtagtatgtggattggttygtygggtttttttygtgttttgtgttgtygtygtygtygtttttgttagagtagtagttgtyggtagtaggagtttygtayggggygyggagtagggaygygttgttatygtttt

SEQ ID NO: 408 - DNA, 586 bp, Artificial Sequence
  Description of Artificial Sequence: Synthetic polynucleotide
gatagtgttyggtaagygggggttttygttgaagtttyggaattggggagggggygtttygggaygtygggggygtygtagggttagtttttgtgtygygtttyggggttgtgagttaaaaatatttagtatttyggygtygggattyggtttttagtgttgggtaagttggggtygtygggggatyggggaygagattgygttygggtttttgtgyggggttygggggtygtgattaagagatttagtatttygggttaggtaygyggtttttggtgttyggtgagygygggttgttggggygygggygygggyggtttgggtttggtttttgyggggagttttygggttgtgttttggggttaaygttttgattttyggggtyggtagtaggttgatygtgttgggtgagttttygygggattattygggyggygggatttaggtggaaggyggyggttgtttygyggtattyggttyggttttgtgttgggagatttgggttgggtttttagggtgggtaggagttyggggagttttagaggtttgtatgygggggtgtattttygtgtttttaygagtagta

SEQ ID NO: 409 - DNA, 466 bp, Artificial Sequence
  Description of Artificial Sequence: Synthetic polynucleotide
tggtttttgttattttygtygtygtygtttgggttttttgagttaagggtygggaygagggagggggaggyggataaagggtyggggtyggggagaatygygygtygggaatttatttggggygtagttttatygatttttyggttattygtttttattaggtaagttaggtttttttatgttttgagttttaaggattttgttygaggggttttyggggatttgggggyggttttttaatggagggtgygatagggaaagtttygagttygttttttttgggaaattaygygtatatttaggattttattttggtttggtyggagtggggatgaggtgygagtygttgyggggtyggtggagtygggatgttaagtttattttttagtygtygygggttttttyggtttggggygtttttaatggatttyggggtyggtttgagttttttyggagygttyggygg

SEQ ID NO: 410 - DNA, 587 bp, Artificial Sequence
  Description of Artificial Sequence: Synthetic polynucleotide
ttagygygtttggyggyggygagygyggygatatygygggagyggaggttyggtttagagggygggyggtagagggtaaggatygggtttggggagttttygggyggtggtygttgagggttyggaygygttattttygagttyggggtgyggttttttttygggygttttyggygtggggygygygttttyggggttttttggggaagagtyggtttttygygtygtaygttgggagtttgatttgttttttttagattatgtgggttttttatttgtatattttygaattatagatgaaaaygtatttaggattaagtgaattgtttttttttgagtttttttgggatagaaaaggaagtaggttttygttttagtttygttygttttttattttyggygttttygygtaygtttttttggggaygtygtttgygttygtgtttygyggggaagagttgtatttgggttygtagygttagtttagtttgyggtaggyggagggggtttagggtttagttaattatttygttaygtygtataggagttagtyggggttttyggttygggagttgtygtttatttat

SEQ ID NO: 411 - DNA, 459 bp, Artificial Sequence
  Description of Artificial Sequence: Synthetic polynucleotide
tygygttggttattttattttygttyggtygatgtttaagtygayggttgtttttaattttygttggttgtgatttttatgygggygtttygyggttaggygtgtgtgtttygatyggttaaggtaggtygggyggaggatttggtttatyggagaggttaygtygggggttgaggyggtttagagggttattaattaaatttttyggyggggygggttygggggyggggygtttttttggtttygtttttyggtttattgttttaygttgtttttttygaggygtttygttgagggyggygtgtggagagtttggggtgtttgtygtyggttgyggtggggtygggttggaggtygygggtgaggtttgtggttaatttygygttgtygaggttttattttttygagtttagtttgattttaggtygtttttaggtyggtgtttagttgaggygggaa

SEQ ID NO: 412 - DNA, 524 bp, Artificial Sequence
  Description of Artificial Sequence: Synthetic polynucleotide
gttgtyggttygtggtyggggagtaaaggttggttygtygygttagggtttttttygaattttyggaggtgtggttttttygtagygyggtttyggttttyggttttygttagtygtttttatttttttgggagygagyggtttyggaggagggaagyggyggyggygtttttaagagatagtttggagtaggygtttttgttgtaggttgygtgttgtttyggggyggtggtatttttttttttyggttttaatygttaggtttgtygtttgygttttttaggggttagttyggagttagagaagtttygttttgggttaggygtagggtttagttyggaatagttttattttttyggttgggtatygttttttataaagataggygtttattttygattttygaggttaggtaaaggttaygagtttttagagtttggatygatgttaaaagttgttgygtttttttgtaggttttagttttttttttygtagtttttaattttttttgaygtagattttag

SEQ ID NO: 413 - DNA, 530 bp, Artificial Sequence
  Description of Artificial Sequence: Synthetic polynucleotide
gaggaggaagygagygttttygagtttygagttygagttttygagtttgagtygtaatygttgyggtattttgtttyggattygtgtgygygggttgygtygagygttgggtaggaggtttygttttgttttggttgtaagtagyggttgggagtagtyggtttttggggaatatgyggygygygtggattttgtttattttgggtttggtggtttgygtgtyggyggagtyggtgagtgggttaggyggaggatgygygygtygtttagggtgtttgaagttaygagaggagttygtagggaataggggagygttatttggggaatttttagtttttaagtatatatyggagattygttgggataaatgygttygttyggttattttttttttttttttttttttttagaaaagygttgttygttggygttatttygyggttygygggaatgggggtatygagaattgyggtttggtttagtygtagaggtttttgaagttatttttaattttttygttttyggygggt

SEQ ID NO: 414 - DNA, 465 bp, Artificial Sequence
  Description of Artificial Sequence: Synthetic polynucleotide
ggtggtatayggtgtgtggggtttggggaggygattgttaygttttttagaatttttatgttttttattygtttgygatttyggttgtygaggaggtaaygagggaggtygagtygttttttttygtgggyggtagygaaattttgygttygtaygtyggggtgtygtygagttyggttttgagtatttagtaaggttaagtaggygaaggagggggygggggtttttgggygygttttygttygygtatagtyggggttttggaagggggtgtgygtagttygtygagttagtttygttygtttgtygttygygttyggttttyggaggyggaygttgygygygttyggggatttyggagygttyggygttttaygtttttttttyggttygttagttgttttttggygttgtttttagatttgttgygtttygatttggggggtagaaggttggttygggaga

SEQ ID NO: 415 - DNA, 454 bp, Artificial Sequence
  Description of Artificial Sequence: Synthetic polynucleotide
taattygggggagaatggtatyggygattgggtttygyggttygtgtttatygaggagttttygggyggtggyggygtggtttttagygyggtttttattygtttttygggatygtagygttgtagggagtagagygattgggtatyggaygtggaagttttggggtttttgygtttygggggygtggtaggttyggttttggtttaggtgygagtgygggagttgygtaagggygaagyggagyggggyggygygggyggtggygggaagttttttttattttgygtttgggatgggygygygtggtattattayggygtygtyggyggttttttgttgygygttygttygyggttgtayggtttaggyggggatttgttgttttttgygtggttgygggygttyggggygtttttgttgttagttttgtyggttttgtttagyggtttgygt

SEQ ID NO: 416 - DNA, 380 bp, Artificial Sequence
  Description of Artificial Sequence: Synthetic polynucleotide
gtttggtygtttttttatttttgtyggtttttygggtygyggatttygygyggygtygggygatgttggtttgttygtggttattatttygttttattttygtttttttgggtygtygtattygtttaygtgttygtttttttttgygtaaaattttaagatgagtaaatattgggtttayggtggagygtygygggggtttttttgagtyggggygggtygggggygggattagggttyggtyggggygtgttygaggggagggatttttyggtttgygattyggygttgttygyggtgtttagygttygttygggygygttatggggaatygtagtatygyggaygyggaygggttgttggttgggygygggtyggtt

SEQ ID NO: 417 - DNA, 357 bp, Artificial Sequence
  Description of Artificial Sequence: Synthetic polynucleotide
yggatattttygggtttatygtygtttttttygttttttgttgtttttaaagttttattatatttttgggtygggyggtaggagtggggaygggagtggaggttttgyggagtagyggttyggggagttgtgggttgygggttgggyggggyggygygatgyggggygggyggtttagtttygttttttttatyggygtttttaggggatgaatgttttttttgayggtttttttatttattgatggattaattttgttygttaattttttagttttygttaaaaatgaaaaggagtygtttgtgtttgtataaatttaagagttaggatggatgtgygggggtggggygggyggyg

SEQ ID NO: 418 - DNA, 421 bp, Artificial Sequence
  Description of Artificial Sequence: Synthetic polynucleotide
tgtttygttttttttttttttttttttttttgttttttttttttttttttttttattattgtttttttttttygttttttatttttttgtagygttaagtyggttttttaatttggtttgttgaaygtaaatygttgagagtttgttgtatygttttttggggtttttggttgtygagtttygttaaggtaaagaygttagtaagygaggaagygtagyggaagaaaaataagygggygygygaggggagttttaggagggttgtygagtggttggtaggyggttttygtttttttygggtggtttygtyggyggttgayggttyggaggaygygygtttygaaaagttagatttygggyggyggygygttaygtygygttttttygygtttttttttygttgygtttygggaaaggaatt

SEQ ID NO: 419 - DNA, 435 bp, Artificial Sequence
  Description of Artificial Sequence: Synthetic polynucleotide
ygyggatttttattttgyggtttgtgtgttyggtttttttygygtggyggggaagtgygggtggttgttygggtttttagaggtygtattatttattgtgttttaggttygtaggaagttagattttgygagaggtgtgtgggggyggagagtggtataggtttgatattgtaggtyggaggaggaagatagtggttgtaaaggtaaaatygggtgttatttttttaagagtttttttagygtgagtgtyggggttagttygaattggagtttgtaatttgtgagtgygagtggggagtagtaggagattttttttataggtgaggtttaggaaygagtttggtygtgttaggtaaggttttttttattgttagtttgtgtttatttatttttgtttttttagattgtataatttygtgtyggttttattattyg

SEQ ID NO: 420 - DNA, 492 bp, Artificial Sequence
  Description of Artificial Sequence: Synthetic polynucleotide
ygygygygtgtgtgtatgtgtgagggtgtgayggaggygtttaygtgttyggttygttygtgttayggtygtttatyggttgtagaggagaagggtaggttgtgggyggyggyggggygyggaggggtagttaggagygtaggttgggtttygtatttttttgttttaaaatttattgatgtagyggttattgyggttgtygagyggygtttttttagagttyggggttgtgttygttygatgtaggatgtaattgaggaagttygttttaaagtaaaataaaataaatttttttagttatgtygtttttttttaatttatttaagygaaagaatggatattagttattagtygttgatttttgttttagtgagaataataataggtatggtgttatttggtattatttgaatattttttaagagttagtaatgggattagaaaaaatgggtgatttaaagaatttttttttttatttatttttttaagtyg

SEQ ID NO: 421 - DNA, 450 bp, Artificial Sequence
  Description of Artificial Sequence: Synthetic polynucleotide
ggagttaygtttyggygagygggggtygyggagygagggggtygttgtgtygttatttattygagtygttygggttggtygygagtygggattygygagggttggygggttttggttttygaggaygtagatatgtggtttgaattttygtttttttagtygttgtttttgtgtatttttttgggygtttttagygaatgygagyggygaggygagggygagygygtygaggaagggygggagaggygyggagtttggtygygtygygttgygtygagygtygggtttttttygygagtttttygggttygygygygygttttttattgttttygtttttygygyggygygtgttttttatttttygtygygygttttygtattygttyggttttaygyggygygygtttgttttggyggtagyggyggyggyggyggygygtttttttt

SEQ ID NO: 422 - DNA, 448 bp, Artificial Sequence
  Description of Artificial Sequence: Synthetic polynucleotide
tyggygyggyggtygaggggtttgggagggaaygggygyggaggygggatygyggtttttttttatttyggggggagtttaggaggyggyggtgttggagygygagtyggagtyggagtyggagaygaagagaggyggtgagaaygygggtgtttagggattttattttyggttttygttgggggttygygagyggttyggggaygtttgggttggggaagyggggttgttatttttagggygggaggtagagaygatttagtttttggtttygtttttttygygaygygattttygaggggttttgggtygygtttgtagygtygygtattttygtgtttttyggygtattttagygtattyggtattttttyggtagggygagggtttygggggaagggaaggtttygggagttaaggagggygttttttaggyggagagtttygg

SEQ ID NO: 423 - DNA, 393 bp, Artificial Sequence
  Description of Artificial Sequence: Synthetic polynucleotide
ggttyggtataggygtyggyggttttygttagttagtagttyggygaggygttggtttatttatggttttygggyggyggtttttgygtttagttttgygygtagttttygtttttygttyggggtygtygagttttygataygggygagatgttgaayggygtaggtttggataaagtttttaagatgtttttgtygyggaggtygaggattygttygttygtgggtgagttgggaggggygyggygagggagggtgggttyggggygggggyggygyggggygygtttgyggttatgygatattgtttygttygygtttygtttttttttttgggttttttgggttttttgggttgtaggattygtygaygyggygygttggtygtayggg

SEQ ID NO: 424 - DNA, 367 bp, Artificial Sequence
  Description of Artificial Sequence: Synthetic polynucleotide
tttttttygygaygyggtttttttygtttttygtaygtttttygtgttttygttyggygggggtygtagtygttttttttttggygygggagagaaaaggygygyggttagtygtaggtggagatattttagttgtgttttyggggatttygtttggtygttgygttttgygtttygtagtygttagagtygttttatttygygaygtttgggttgggygttttaaagtygttayggttttygttttttttaggttagtaaggygygygtttttttygttagtygttatggtggtttgggaaaggttyggtttgtagaaygtaattgatatygyggaggttttttgggttttagttttttttttyga

SEQ ID NO: 425 - DNA, 519 bp, Artificial Sequence
  Description of Artificial Sequence: Synthetic polynucleotide
gagttyggtagggttaygaggygtyggtttyggggtygtttgaaattygaagagatttygttygttygygygttygtyggaygaattttygyggaggtttyggggygtagtyggygtgagggtggggttttatygtaggggygtygggagttttttygtttygttagtttaattaaggatygtttagaggggtttttattttgaatttyggtttttttaaaggaagggtagattttagatttttttttttttttttygaaygtgttttgggtgtttttttgtttttttttttggtaagttaggatagygtatagtgtayggagtttygaagtttttttagttattttyggatttttggttaaatttgagggtgagttygaaagatygttgtygtyggyggttattttagygygggttygttgagaatggaaatagtaagtgygygtyggttaggtygttattttttttttttttaatagttygggtagtygtaggggttagtttygggttagttagggt

SEQ ID NO: 426 - DNA, 459 bp, Artificial Sequence
  Description of Artificial Sequence: Synthetic polynucleotide
atattatttggyggagtttyggggaagagttttaaaggygygygttttttygtgtttygygtattygaaygggagtygyggagagttygtttttygttgtygtyggygtttyggggaggtaagtgttattygyggatttygagtygyggtygggtgggggyggttygyggttgtttygygttygggaagttttggttggggttgyggtyggagggyggygtttaagtttttttgaaggtttyggagggtagttggagyggygtagagtttgygyggggatggygggggtggtygygggtyggggtygtttgggggyggttatttygggyggtgygtggaaaagtaggtattggtgygyggygaggggygtaygttagagttttagtttygygttttgygtatttggygygttttggtygyggtttyggygagttttagtttgtttygggtygygatttt

SEQ ID NO: 427 - DNA, 384 bp, Artificial Sequence
  Description of Artificial Sequence: Synthetic polynucleotide
ygttyggttgttaggtaattyggttttyggttttttayggyggttttttyggtgtgttttattaagagygatagggttggtgattygaggggygygtgygyggtygttagtttgggatttgtayggatttttttttttttagtaygttygttygggggttttttttttgttaygtygttggggttygttygttatttatagttttygtagagtttttygggtatatygyggttggtygttyggggttaaggatggggygggagygtttatttattttygygtyggtyggggtatttaagaggygygttygtagttatayggygtttygtttttygtttygaaaaagtttttgtttttttggygyggtgtggygttttygttagt

SEQ ID NO: 428 - DNA, 545 bp, Artificial Sequence
  Description of Artificial Sequence: Synthetic polynucleotide
ttgygygtagtygggggttgggggtttttagttagtagggatttaygggtagtttygggtgtygggatygggygttygtttttygggygggagtagaggtyggttygatggagatttttttgagaaatggyggtttttattygttttttagttttygagygttygtygtttgygtttagtattttagtttttaagtttttttgagtyggggttgygttttygttgtttttttyggtygtygttttttggygttagagggatttygyggttygtaygggtttgttttyggtttygttyggagggtgtgygggttttygtttygttggtttygtttgtttattayggygygtttaaatttaygyggttygyggttttttgygtgttttgtygatttygggtygtaggaggggttagtttygtyggtttttaygyggggtttgygtyggtagygttaygggttggaaygygtttygggagaaattattygygyggggtygyggygttttttgttttaattttygtagggagtygttaggygggtgttt

SEQ ID NO: 429 - DNA, 291 bp, Artificial Sequence
  Description of Artificial Sequence: Synthetic polynucleotide
gagaagggtggaggagygygttyggtgttttaaggtttttaggyggagygygggygygaggtgygggtttyggggyggagygtaygttygggaggygggaagtgggtagtagygttttygtttggtttttgtgygtttygattygaygttttttygttygattaggtgtttygagagygtatagttgggagggttttttyggtygyggygagatttaygtttgyggtgtgttagggyggyggygayggtgaygggygtggggygyggygttgtttyggttgtygggtygtt

SEQ ID NO: 430 - DNA, 492 bp, Artificial Sequence
  Description of Artificial Sequence: Synthetic polynucleotide
tagygattttaggtattagtttygaaggagggyggggagatygtaaaggggaagtgttyggagggttaayggttttygygtattttgygtttttttgaagygygtygttttttygygtyggggattgggatttgtttttggggaattygtttagaagayggyggyggattggggtygggtattttttagggttgttaggttttttttagttttgtatttgtygygtygttttatttygttaggaagttttagagatttyggggatggggtgggagygtttttttatygygggtttaaaaagaaggaaggaygtttttaggggtygtagaaggaggattagttttaagttataatttttttyggatttaaggtaggtyggttggggtttygygtttatayggtttttggygggggttygygygtttygggagtttygyggttyggggaggaaagaggagataagagataggygaggattayggggttgattta

SEQ ID NO: 431 - DNA, 381 bp, Artificial Sequence
  Description of Artificial Sequence: Synthetic polynucleotide
ttttgggttttgagygygtgatatggtttgtygtttttgattaagaygggtayggttattyggygyggygagggtaggggygttatttttatatttttttyggttygggygygttttattttgtagyggtggttttggaattagattttgatttgygtgggygtgaggyggatgaggttggttaggtgttygygttygggygtygataggtatygttgttgtygaaagygtygttttagttygtaggtttgygttttggagaaaagtattygtygttttygttttttgtyggygtttttttygtygttyggggtttttttgttattgttyggtgattygtyggtygagggtttyggggatttggagtttgagttttgaggg

SEQ ID NO: 432 - DNA, 430 bp, Artificial Sequence
  Description of Artificial Sequence: Synthetic polynucleotide
aggygtggggagtagagyggygttgaggggagggtagaggaggagagagtttggtagyggaggagtagaggygggygtygtatygtttygtaygttygttygttygggagagtygygggyggtygtttgggygtatttgtygggttattttgtttyggaggtaagtttagatttttyggtygygggggygggyggaggggttygtagtgggyggggtygyggtaggggtygygagttggyggygggagttggaggttgttttgygttggygggtgttttagttttggtttygtttyggagygygtagattyggyggyggygtggygttygyggtaagttygggtggtygtygygaygagatttgggagatayggggtygtagggygggagggggagttgagtyggtagagaaaatgtttaggaaggggtt

SEQ ID NO: 433 - DNA, 643 bp, Artificial Sequence
  Description of Artificial Sequence: Synthetic polynucleotide
tttgtttttttttttttygtttagtttygtttttygtttgtygggaygttagagtttttttttttttttygttgttttttttttggygyggattatttttygggtagtaaagtagttgtttyggtttaaygygtaaagtttagaaagttaggagtttttagatggttttggtgatttttygggattatgtttygtygttttttagtttggagagaagttatttygggattttttattttttygttttttttttyggttttgttygagtttaggaggyggygttggygtgygttattttygttttagttaaggttttttgttygttygygtattygttygtygttygyggttygygygttttttttttttttygtttaagttaaataggttaaggttggggtygyggtagggatagggttyggggtagtttgggattagggaygtgggatagggagttygggtyggggtaagggygggggttaggatyggttaygatttatagaaagaattygggagaggaggggttgtygttggtggagttygtttttttgaagtyggagttggygagtttttygtatttgattttgtaggygtttttttygygggttagtygggatattttttgtttaagttgttttatttg

SEQ ID NO: 434 - DNA, 458 bp, Artificial Sequence
  Description of Artificial Sequence: Synthetic polynucleotide
tgaggttttttttggataaygtatttgaaaygtaattttaaggtaagaagttattttttaggygygtagtygaagtttagtgttaaggaggtyggagattygggtgttygygtatttygaaaatagtttttgaggggttttttgagtatttttttagygtgtttgggaggtaaattygttgattagtttttgagaggagtggttagaggaatttaggyggggaaggggayggtggattttaggagagtgtaatttataaaggyggggggyggggaygtttaggttygagttttaggattttgygtyggaygtttygttygtttttttaggttttttgttyggttttygtattygygygggttyggagaatttttgagtatyggtttttagttttygggyggggttttagyggygttatttattyggttttttygttatttgyggggttattttygtat

SEQ ID NO: 435 - DNA, 452 bp, Artificial Sequence
  Description of Artificial Sequence: Synthetic polynucleotide
gggttgtttttgttygtaggttygggygttttygttaggaggygatagygttatgtttttttaggttttyggygtttygagatttttgggtagatggggaygtattttttagaaattgagtygggtygtttaggggygagggaaygtgygygggtaaggttgtttaatttttagggttttttatgttttttttgygtttygaygtgygagaatattgtttttggtagtgtagggygtttttatttattatttttttyggttgggttyggttagtagggagggtygttttgtgygygygttttttttttattttttagggyggygtagggtggygggttttgtttttygagygtygttygttyggaggtttttgtttygagggygtggaagggagggtttygggggygggggaggtgygtatttttygygtygygtattttattygygtttgt

SEQ ID NO: 436 - DNA, 440 bp, Artificial Sequence
  Description of Artificial Sequence: Synthetic polynucleotide
gtttygtgtttyggggygygttttagtttyggtattattagtttttygtttttttyggaggggygttygagtgygttygatayggttagtagygtygyggygagtagtagtagygtgggtattggtttaaagtttygagatttyggagttygtttygygttttttatgtygttgtttagtttgygtttttygaatttttygggtatagttygttgtattggagttttaggagatatygttygtagtagygtayggagygagggatttttagttygggtygggagagtaaagtttygttggtttgttttggattgttaaaattaataatttttattattygttggaagggygygtagagtyggttatagtygaagttttyggagttattaaaaggaggygttgtagttttgtyggygygygggaagttttttttttagygt

SEQ ID NO: 437 - DNA, 439 bp, Artificial Sequence
  Description of Artificial Sequence: Synthetic polynucleotide
ygggaygttttttgtttyggtttygagttygagttygattttygttatttagttgggtgttttggggattttggttttttttttttagattyggatattgaagtaggyggtagygggtgtttttttatttggttattttttyggygtttagygygaggtagggtgggygaggygagggyggygttttgygagggagggyggtygtagaatttgygggtttttagygttttttggygaggtttttttttatygtyggygggatttttatgggtaatygggggagttgggattgaaagtttggagagtttttttygttgtgttgttggggagattgaggtttagtgagattttagggtttgttaggygtttttaatagygagggtagagagtatayggagagtyggttttttagggggaggaagtatttttttttttttyg

SEQ ID NO: 438 - DNA, 396 bp, Artificial Sequence
  Description of Artificial Sequence: Synthetic polynucleotide
tttgyggtgygaggygttttyggttyggygyggyggyggagttyggttggygggggaggggagggggttgyggagggggyggggtgggggtyggagtygtttgagtyggygggagygggtatttttgygygtygygttyggtttygttttygygtttttygygygttygtygyggtttttttttygygttygttygttygtygggttttygtygtygtttyggggtgtagtygagyggtygygtygggttttygggayggggtggaagtgggggtggggggaggggatyggggtygggtyggggtygygttgtttgygatgtygggygttygtygtagtygttgtygtyggagttygggatggggygagaggttgyggyggaygttagtatttttt

SEQ ID NO: 439 - DNA, 418 bp, Artificial Sequence
  Description of Artificial Sequence: Synthetic polynucleotide
gatagttatataggttttggggtagggygygtttygygttttagggagttaygttagttygttgygttttygtagtaatygtygtttgtaygtggyggggygagagagttgttagggyggttttttygtttygggtttgttgggyggggtyggttaaggtgygygtgttygttggttttaayggttttgttgggygtttttgttgagaggygggaggggttgagagtttgtgygaaggtaggtggatagattgtattgtttgttgttgygtttyggaggyggygattttygaaggygagttgaaatayggttggagygtttttaggttatagtttgtagtygaygattgtggaagattaggagtyggagaggtggtttatttttagggagygtttgtgttyggagggttttttatttt

SEQ ID NO: 440 - DNA, 363 bp, Artificial Sequence
  Description of Artificial Sequence: Synthetic polynucleotide
tatygyggggttgygaygaygygggttyggagygaaggygyggagtagggaggatgygttgttgttgggaattggtyggygggagygyggttttagttttygttagtagttaygygygtttgggggyggygygttgygagyggttgagatygygggygggggygggygtttggtttgggtagygtttttagygyggtgtgggyggygagtttygtagggttgtaatygtttyggggtgggggtygggataggtatygygggygtaatttgagtttttgtttaygygtagyggttttttagtttygtyggtttaggtaatttaggtygttgyggtaaygtagtgatygygttttaggttygygt

SEQ ID NO: 441 - DNA, 371 bp, Artificial Sequence
  Description of Artificial Sequence: Synthetic polynucleotide
gygggaagaaggtaygaggygtygtygtagttyggttaggggtyggggtttygtygttygtygttgtattaatttgtygtttggtttygtttygtygtygyggttygttgygttttgggtggyggggggyggggagagyggggagttagagggtttgyggtggtygagggagggattttaygayggggagttygttyggtgtygttttttttttttttttygttttttygttttttttatttygtttttttygtygatttygggagygaygggygttygtgatttgygaaygttgttaagtgayggttttygagtttgaagygttygygaggaagygagygttagygygggtygtyggygatgayggtygt

SEQ ID NO: 442 - DNA, 397 bp, Artificial Sequence
  Description of Artificial Sequence: Synthetic polynucleotide
taggtttyggaaggagttgygygagaaggggtygtygygggtgttggagtygttgaaggaygtggtgttgatygaaggtagygyggttaagtttatttgtygtatttyggttttttyggatttatttattygttggagtaaggayggtaaggagttaygtgayggttttaagtatygttaygttttygaggattttgaygtggtggtattggtggtgygygayggygagttggtagatttgggttagtatagtattaaygttattaattttttyggttagtgtttygattyggygygtattttygtggaaggtaygygygtttygggygtagygttagggygtagattagtattatttagttagagttygtagttyggtttagttgygygtgtttat

SEQ ID NO: 443 - DNA, 366 bp, Artificial Sequence
  Description of Artificial Sequence: Synthetic polynucleotide
tygagygggygttyggtgttttttagygttygtygttttttttgtygtygygtygagttygtygygtygttygtttgtyggttygagggagggggygygtyggyggttttattttttttygttygtttygygygtttttttttttttttgtatttttygggttatttggtagtggggyggtagygyggaygtgggtyggyggtygyggagataggttttygggggtygtgygygggttgyggtyggggatttygggtttagtygygtttygagaygagtgagggtagygagtattttygtgaagggtttttttygatttagtgtttttatttttagtygtttattagtyggttggaaaggggttgg

SEQ ID NO: 444 - DNA, 907 bp, Artificial Sequence
  Description of Artificial Sequence: Synthetic polynucleotide
ygyggggtattagtttagtttttttttggggatttygtattygtagtttaaggaatyggtggagtaygaattttatttttgagttggygtaagygttttttttttatggagatttatttyggtttttttttgaggttttttttttaagtattttttttttygagtatttagtatttttttaattttagtayggttyggggtattagttttttagggygggggttgttttatygtttaagggaggggatagagggtyggtttyggtttaggygatttttgtttttygttaggggygttattttggttttttttygattgtygttygtygttttygttttttyggggggtgtgttttygaagtaygggggygygggaggttaagggtgtttttagttttygatygagattttttttygagtyggyggygaatggtaggttttatttaaagagtgtttggtggygygyggtgttttttttggagtagttttyggygttygttygtyggggtttyggygatygttgttttttttttttttttttttttttttttttttttttygtttttttttttygtygtttygttatygtygyggttagggttggaggygtygttgttatttttgtgtyggaggaatyggygttgtyggtgtttgggggtyggggygygggygaagtygggtygyggaggatataataggtagagtygggggtgttyggtygygygtttttygygtattatgtagttttttgttatttttttygtttttaggttaaaattttgagtatgatggaagataataagtagttygygtttygtatygatggggyggtttagtyggttagttaggaggtgattaatttgygagtygaatttayggttattaatyggagattggyggaattgagt

SEQ ID NO: 445 - DNA, 562 bp, Artificial Sequence
  Description of Artificial Sequence: Synthetic polynucleotide
gtttttttagaaagtgygatttttttttaggaaagaagtagggttatttttgttttaaaagtatttattttgtaygttttttttagtgtttggtaygtggygaataaattaattaggatgaaaggagttaatttaagtgyggagtgttgaattttagaggaagaaattygygtttattaggtttaggtttgggttaggygttgttttggyggygttagggaggatatygtgtttagagttyggatttagtagttyggtttygygttttttttgtttygyggttygtaggtttagtttttaagygtttagttttygyggtttttgtggygttatagttagtttgaagaatggttgttttggagaygtaaatttaagagttttgtttttggagttgagaattgtagygyggaggtttyggagygagtyggggtagtyggggtyggtgggtgygttygyggttyggggagagggggygygyggggttygtgagggygygtgggggyggyggtaggggtgygaaattagggttygaggggygygygtggtygggagyggatttgta

SEQ ID NO: 446 - DNA, 563 bp, Artificial Sequence
  Description of Artificial Sequence: Synthetic polynucleotide
gagttgtaggaggaagaggaagaggagtaattygagggttgttyggaggaggaggagaatygtgyggtagagggagatttagtagaggaggaggtygaggygtagygtgygttagtggtygttatgtattttgagtgyggggatttgttggatattttggagaatggtygtggggaggygttaggaggyggygggggttttttgggttygggggtygggtygtygtttttgttgttgggtagygttttygatatgaaggttgagttgtygtaatttattagygatttgggygagtttagtttyggtaaygaygtgygtattttgtaggtygatttgygggtgaygygtttgttgttaggygatagtaygggtagygagagttttatygagggygggggttttgaygttattttygttatygtyggggattygtttygttaggtygayggygttagtgtagaygagttttattygggttgagttttttygygygtygtyggygttttatygtggttatttattygtggtttygataatttttttgttttttgttygtttttagg

SEQ ID NO: 447 - DNA, 509 bp, Artificial Sequence
  Description of Artificial Sequence: Synthetic polynucleotide
gtyggaggyggatgtgggatggtgttaataaagygygtagtygaggtttggttatagtgggtgttgataaatygtttattgtttgtagggatygagttttyggtygagggaggagggtygagtagggatttagattttttygggtygattttttttttagtttttttygttttgtygtygtttattgygtgttgttttygttygtttttttttttttygttttttttttttttttttttgttttygygtygtttygygtttttygttygttgtagtyggygaggagygtygtaygttggtttyggygygaggagttttygggttttygggygggtattggagtaaggagttgygagygtagttygaggyggggtayggyggaaggygyggygagagyggggtttttgygagygtagtyggaagggygtttaggagaagggggaygtygttttygtttttgtayggtgttyggttttttygggtttygygygyggttataattyggattg

SEQ ID NO: 448 - DNA, 442 bp, Artificial Sequence
  Description of Artificial Sequence: Synthetic polynucleotide
gttttttttttttagggtgtttggatatgttgagtttttagggttagtttatttttatygtygatyggtygtagttgtattgygtagttttttttattagygagttygaggagtttattattatttattaygattaggtttttatygattgttagggyggygattttttgaaggtgaggygtttayggttagttaatttagtyggagggyggtaygggagggttggaaagggttggggygttgtatttagygtggggttgttgagygtaggtagttagtggtattttttagatatttygttggtgttygagtyggagaggygygttygaggatttttatayggygagaatttygtttttattygaagatttygatttatatatatttagtggggttggggtyggtgtttttggaygttgttatggtttaaatttttttttgg

SEQ ID NO: 449 - DNA, 441 bp, Artificial Sequence
  Description of Artificial Sequence: Synthetic polynucleotide
tagaaattgggatttttyggttttttttgtagttttttttttttygtttygaagttygggyggtttgttggttgtttgttttttygttttyggtttagaggtttttggttggygggygtttygtyggtygtyggttttttttttgaaattygtyggygtatatgaggtygttgttttygtygtaggygttggyggttttttygyggtgttygtggtgatgttatgtttygttattaygygggaggagaggagggyggygtygtygggttttgggtgaagagyggygtagyggyggyggyggygggyggggggygtttgggtagyggtatgaaggatgtggagttyggtyggggtagggtgttgttgaattyggtagtygttaggggygayggtttgttattgttgggtattygygyggttaygttyggtggyggyggyggt

SEQ ID NO: 450 - DNA, 410 bp, Artificial Sequence
  Description of Artificial Sequence: Synthetic polynucleotide
ygttttgtttatagtaggatttttttgtygaattgygaaggtttgygttgygtggggattyggtgaattttttttgtagygaaagtaatttagatggaygygggaattgaygtatyggtatagaggattagygygtttttaagtygattttygggtyggtttttygttgttttttygtaatttttttttttttaggattttttygtyggagttttggtttatygtgattttggggtttagaattgttgggggtttygtygttggagtagtaggggagatttyggggyggaagagtyggtgygggtygtygygtggtttygagaggygtttyggggtygtagyggattgttagttygyggttaaggygtagtaggttttygatygttttgagtatgttgttygtttgtttt

SEQ ID NO: 451 - DNA, 424 bp, Artificial Sequence
  Description of Artificial Sequence: Synthetic polynucleotide
gttttygggyggggyggggyggaggatagtaygaggtttaggatttttaygttatttttgtagtttygygtttttttttttagttttggtygggttttygygttttttygattttygatygtaaagtyggggtgygagagggaaagggaagtgaggyggtaygygtatggagggtgtgagtgyggatatatatatagggtggttaggtaygaaaaatttygttttttttygaattttygtttyggattagttgtagttttattattttagggttttttgygtygggataaagttgtygyggtttttttgygttygyggagygygtygtygttygatttttttagtttttttyggtygtaatttygttttaaaggattygtgggtygttttagggayggaggggattyggagtygggygttygta

SEQ ID NO: 452 - DNA, 581 bp, Artificial Sequence
  Description of Artificial Sequence: Synthetic polynucleotide
agattyggyggaaaggagtygyggaggggaattgagtgtttttagtygggtatgttyggygagatygygatgttyggtgagatggtaatgttyggggagatygygattttyggggagatygygatgttyggggagatygygttgttyggagagagggygatgttyggagaggtygygatgttyggggagattaygatgttyggggagatagtatyggtttttttagaaattttttggtttgaggggtaagtagtagtygtaggaagyggattyggyggaaaggagttatygaggggaattgagtgtttttagttgggtatgtttggggagattaygatgttyggggagatygygatgttyggggagatagygatgttygggggtatygygatgttyggggagatygygaygttyggagggatygygaygttyggggagatygygatgttygtttagggagatygygtyggtttttttagaagtttttttttttttgaaattygttgtagtttataattttttaggtttggttttygttttgtttaggttatattttygaatttatygatttattttgttyg

SEQ ID NO: 453 - DNA, 656 bp, Artificial Sequence
  Description of Artificial Sequence: Synthetic polynucleotide
gttttttttagttgttyggygagagaatttgattttgaaygtagygygggttgtaygtagaattttygggttgggtygygygtttygggttttttgygygtattttygggtygygygtttygyggttttygtagttttttaggttttttttttttttttttttttttttttttttttgtygggygyggyggttatttygaygggyggygygggygygggtatttgtagaatgtyggygggtyggtttygygtatygtgtagtygttgggttygttttttaggtagtagggtatttgttggtygtggggttgtaggaaaggygatagttgyggyggygggtgtagtagtattagygggttyggagataygttgttgagtggggggaaattttttaggtygttggagtygaaygtygtagttttagattyggggtygtaggggaggtyggtttgatygtagatttgygygttggyggyggtygyggygttgaattygtaggyggygttttyggggtagttgtatayggygggtttgttgttgtttaggtatatttygtttaggggtygttttagggggattttgagttgyggayggtttaggggttttagttygtttttttggatttgatgtagtagggttattttagatgttttggt

SEQ ID NO: 454 - DNA, 651 bp, Artificial Sequence
  Description of Artificial Sequence: Synthetic polynucleotide
tttatttygtagaagagaaatttttttttaaygttttgttgttttaygggggattttyggggtgggtattaygtggttygataygtagtygtggggttttagagygygtgygygygtygagttyggtygttaygtttttttygagggtygtttygttttygtygggtttygygagygygyggtgggggaggggagggtttyggagygygtttgygtggggygggggyggtagtygattaggggttgggtttggtygtttagggtygggttttggttygtygtttayggtgyggagggttggtgggttttttttggtygtygggttygttayggygygggttttggttgyggggyggaggtggggygggagagtygaggataagagtttgaggtttttygaggygygtgtygyggygttygtttttgygggattttgygtygggygttttyggtyggygygttyggttttygttttgtygtygagggaagtaygygygaygtttttttygtygtygtygtggtttttttyggtgttygtgatttgttgagaggttggaaagtagtayggyggagaggagttttgtattygttaggygggaagtttgygyggataygygtgygtatttayggggyggygggygggygtggggg

SEQ ID NO: 455 - DNA, 564 bp, Artificial Sequence
  Description of Artificial Sequence: Synthetic polynucleotide
tttaaattaaygagttttatattgatttttatttagtattgaatagttgtattaattttttaattaygaaatttygttttagtttttaygggaggggagagttttygaaygyggggyggtgggggttygygtagagtaggttygggaggtygagyggaggagyggggttygygtygggtataygygttttttaggtyggyggygyggygtgggtttgttttygggagggttyggygaggattatygagttygygtagttttygtygatttttyggaaatgtgatygtygaagttagaggggtygtagggtttatttygtagtttttygtaaygygttaatttggaygttagyggygyggggtttyggtygggtagggggygttyggtatyggygggtttatttyggttygttygttygtygtaagttyggttyggtattttttttgtgygtttttttggttttttagttttttyggygttyggtttygttyggtygtgattttttygttttttttattattttaagyggggaaaggggtygtttyggygggggtygggtygggg

SEQ ID NO: 456 - DNA, 495 bp, Artificial Sequence
  Description of Artificial Sequence: Synthetic polynucleotide
ygtgttaaggaagtggygttaatttgaggttttgggattagatttatyggatttaygtyggttttgttaygtgttgttygtagttttygttygtttttttygygttggtaaygggtattgattgttygatattttagygatygtagagatttttttaatgtygggygtattatyggygggttagyggtttygttggtttttttgatatattttttatagttattttttttagttgagatttttttttttaatatttygttaattaaygtgtaattttttggttaaaatgttagagttaagattaaatttgaagaaaagaatgaaattataggaagttttttagatttagtygttagtaaggttatggttygaagyggtgtaggggyggygygtygggaagttattggtagagttgtgygtattggggggtgttgtaagygttggggagagtgtggagaggttgygtggagttgygygttyggggtgggagttgta

SEQ ID NO: 457 - DNA, 710 bp, Artificial Sequence
  Description of Artificial Sequence: Synthetic polynucleotide
gaggyggtggtagygygtttttgtttygygtttygtgyggggtttttgttgtygatagttgttgttttgatagaggyggyggyggygatagtatagagtayggaggggattyggygagttagtttatatgttgttttgaygaggtggttgtttaatygygggttagygatatatttatttaaggataatttttagggtttattagggaattaggaattttttygttttttttttttygttttttgttttygygtttggygtttgttygggggatgtttaggygygggtatttatygttyggtygggggygttttgggttgttggttgtagtgtgaagatttagtagtagtygtygttatygtygttgttttgtggggagagtggyggggagtttttgggagygttaaagygttgttttygttgtagtygggagagggyggaggaggagaygggygggtyggggtgaggatagggagttggggaygyggygatttgtgtttgaggagggtagttagygtttttgttgggagttgtgggttyggggttgtttaggaggtttaggtgtgttgtggggygaggttaggaggtgatagttgtygttgtagtygyggggggttttyggggttgtaggattygttttttttatttttyggttttagtygtttagtttttyggtttttttgttttatttttgagttaattttttattg

SEQ ID NO: 458 - DNA, 586 bp, Artificial Sequence
  Description of Artificial Sequence: Synthetic polynucleotide
tattgttygtaggagtayggaggtgtattttygtatgtaaatttttaaggtttttygagtttttgtttattttggggatttagtttaggttttttagtatagggtyggatygggtgtygygaagtagtygtygttttttatttgaatttygtygttygggtggtttygygaaaatttatttagtayggttagtttgttgtyggtttygaaagttaggaygttggttttagagtatagttyggggatttttygtaaaaattagatttaagtygttygygttygygttttagtagttygygtttatygagtattaggagtygygtgtttggttygaagtattgggttttttggttayggttttygagtttygtataaaaattygagygtagtttygttttyggtttttyggyggttttagtttatttagtattgagagtygggtttyggygtygaagtattgaatgtttttggtttatagtttygagaygyggtatagaaattggttttgygaygttttyggygtttyggggygttttttttttagtttyggggttttagygggagttttygtttatygagtattgtt

SEQ ID NO: 459 - DNA, 466 bp, Artificial Sequence
  Description of Artificial Sequence: Synthetic polynucleotide
tygtygggygtttygggagggtttaggtygatttyggggtttattagaggygttttaggtygagggagttygyggyggttggaaggtgaatttgatatttyggttttatygatttygtagyggttygtattttatttttatttyggttagattaaagtagaattttgggtgtgygygtgattttttagggagggyggattyggggttttttttgtygtattttttattgggggatygtttttaagttttygagagtttttygggtagagtttttagggtttagagtatgggaggatttggtttgtttggtggaggygagtagtygaggggtyggtggagttgygttttaaatgagttttyggygygygatttttttygatttygattttttgttygtttttttttttttygtttyggtttttggtttaggggatttaggyggyggyggyggaggtggtagaggtta

SEQ ID NO: 460 - DNA, 587 bp, Artificial Sequence
  Description of Artificial Sequence: Synthetic polynucleotide
gtgggtgggyggtagttttygagtyggggatttyggttggtttttgtgyggygtgayggggtggttggttgagttttaggtttttttygtttgtygtaggttgggttggygttgyggatttaagtgtagttttttttygyggggtaygggygtaggyggygtttttagggaggygtgygygggagygtyggggatgggggaygggyggggttggagyggggatttatttttttttttgttttaagaggatttaaaggaaaataatttatttgattttggataygtttttatttataattyggaaatatgtaaatgaaaggtttatatggtttgaaaggggtaaattaagtttttagygtgyggygyggggaatyggtttttttttagggagtttyggaggygygygttttaygtygagggygttyggggaggaatygtatttygggttygggagtagygygttygggtttttagyggttatygttygggggttttttaagttyggtttttgttttttgtygttygttttttaggtygagttttygttttygygatgtygtygygttygtygtygttaggygygttgg

SEQ ID NO: 461 - DNA, 459 bp, Artificial Sequence
  Description of Artificial Sequence: Synthetic polynucleotide
ttttygttttagttgggtatyggtttggaagyggtttggaattagattggattygaggaggtaagatttyggtagygygaggttaattataggttttattygyggtttttagttyggttttatygtagtyggyggtagatattttaaattttttataygtygtttttagygaggygtttyggggaaagtagygtgaggtagtgagtygaggggyggggttaggaggaygtttygttttygagttygtttygtyggagggtttgattaatgattttttaagtygttttagttttyggygtagttttttyggtgggttaggtttttygttygatttgttttagtyggtyggagtatataygtttggtygyggggygttygtataaaagttatagttagyggaggttggaaatagtygtygatttgggtatyggtyggaygaggatggagtgattagygygg

SEQ ID NO: 462 - DNA, 524 bp, Artificial Sequence
  Description of Artificial Sequence: Synthetic polynucleotide
ttaaagtttgygttagaagaggttggggattgygagaggagaggttggggtttgtaggggagygtagtagtttttagtatygatttaaattttaaagattygtggtttttgtttgatttygagggtygggaatagaygtttgtttttgtggagagygatatttaatygagaaaatggggttgtttygagttgggttttgygtttggtttagggygaggtttttttggtttygggttggtttttgaggggygtaaayggtaggtttggyggttggggtygaggagggagggtattatygtttygaggtagtaygtagtttgtagtagaggygtttgttttaagttgttttttgggggygtygtygtygtttttttttttyggggtygttygtttttaggaaagtggaggyggttggygaggatygagagtyggggtygygttgyggagggattatattttygggagttygagggggattttggygyggygggttagtttttgtttttyggttaygggtyggtagt

SEQ ID NO: 463 - DNA, 530 bp, Artificial Sequence
  Description of Artificial Sequence: Synthetic polynucleotide
attygtygagggygaagaagttgggagtgattttaggggtttttgyggttagattaaatygtaattttyggtgtttttattttygyggatygyggggtaaygttagygagtagygtttttttgaggaagggaagagggggaaagggtgatyggaygagygtatttgttttagyggattttyggtgtatatttggggattgggggttttttaggtggygtttttttattttttgygggtttttttygtagttttaaatattttaaayggygygygtatttttygtttggtttatttatygatttygtygataygtaggttattaagtttaaggtgagtaggatttaygygygtygtatattttttagggatyggttgtttttagtygttgtttgtaattagggtaaaaygaagttttttgtttagygttyggygtagttygygtataygaattyggagtagagtatygtagygattgyggtttaggttyggggattygggttyggggttygggggygttygtttttttttt

SEQ ID NO: 464 - DNA, 465 bp, Artificial Sequence
  Description of Artificial Sequence: Synthetic polynucleotide
tttttygggttagttttttgttttttagatygaggygtaataagtttgaaagtagygttaaggagtagttagygagtygaagggagggygtggggygtygggygtttygggattttygaaygygygtaaygttygttttyggggatygggygygggyggtaggygagygggattgattyggygggttgygtatatttttttttaaggtttygattgtgygyggaygggggygygtttaggaattttygttttttttttygtttgtttgattttgttgggtatttaaagtyggattyggyggtatttyggygtgygggygtagagtttygttgtygtttaygggagggagyggttygatttttttygttgttttttyggtagtyggggtygtagaygagtggaaggtatgagggttttaggagaygtgatagtygtttttttagattttatatatygtatattatt

SEQ ID NO: 465 - DNA, 454 bp, Artificial Sequence
  Description of Artificial Sequence: Synthetic polynucleotide
gygtaggtygttgaatagggtygataaggttagtagtaggagygtttygagygttygtagttaygtagggggtagtaggttttygtttgggtygtataatygygggygaaygygtagtaggaagtygtyggyggygtygtggtggtgttaygygygtttattttaggygtagagtgaaaagagtttttygttatygttygygtygtttygtttygtttygtttttgygtagttttygtattygtatttggattagggtygagtttgttaygttttygggaygtaagggttttaggatttttaygttygatgtttagtygttttgttttttgtagygttgyggtttyggggggygagtggggatygygttgggggttaygtygttatygttygggggtttttygatgaataygagtygyggagtttagtygtyggtgttattttttttygagttg

SEQ ID NO: 466 - DNA, 380 bp, Artificial Sequence
  Description of Artificial Sequence: Synthetic polynucleotide
ggtyggttygygtttagttagtagttygttygygttygyggtgttgyggttttttatggygygttygggygggygttgagtatygyggataaygtygggtygtaagtyggggagttttttttttygggtaygtttyggtyggattttggtttygttttygattygtttyggtttaggggggttttygyggygttttatygtgagtttagtatttgtttattttggaattttgygtagggagagaygggtaygtggaygaatgyggyggtttaaagagaygggaatgaagygaggtggtggttaygggtaggttagtatygttyggygtygygyggggttygygattygagaaatygataaggatggaggggyggttagat

SEQ ID NO: 467 - DNA, 357 bp, Artificial Sequence
  Description of Artificial Sequence: Synthetic polynucleotide
ygtygttygttttattttygtatatttattttggtttttgggtttgtataagtataaayggtttttttttatttttaaygagggttggggaattaaygagtaggattagtttattaataagtaaagagatygttaggagggatatttattttttgagggygtyggtagggggagyggggttgagtygttygtttygtatygygtygtttygtttagttygtagtttatagtttttygagtygttgtttygtaagatttttattttygtttttatttttgtygttyggtttagaagtgtggtgggattttgggggtagtagggggygaggggggygayggtgggttygggggtgttyg

SEQ ID NO: 468 - DNA, 421 bp, Artificial Sequence
  Description of Artificial Sequence: Synthetic polynucleotide
agtttttttttyggagygtagygaggaagggaygygaggggaygyggygtagygygtygtygttyggagtttaatttttyggagygygygtttttygggtygttagtygtyggygaggttattygggaggggygggagtygtttgttagttattyggtagtttttttggggtttttttygygygttygtttgtttttttttygttgygttttttygtttgttggygtttttgttttagygggattyggtagttaggggttttagggggyggtgtagtaaatttttagyggtttgygtttagtagattaggttggggagtyggtttggygttgtagggaggtagagagygggaggaagaggtagtggtaggagggaaagggagagagagatagagagagagagagagagaggaagygagata

SEQ ID NO: 469 - DNA, 435 bp, Artificial Sequence
  Description of Artificial Sequence: Synthetic polynucleotide
ygggtgatggagtygatayggagttatgtagtttggagaagtagggatgggtaaatataggttgatagtgggaagggttttgtttagtaygattaggttygtttttggattttatttatgaaaaggattttttgttgttttttattygtatttataaattataggttttagttygagttgatttyggtatttaygttgaagggatttttgggaaaataatattygattttgtttttgtagttattgtttttttttttygatttgtagtgttaaatttgtgttatttttygtttttatatatttttygtaaggtttggttttttgygagtttggaatataataggtggtgyggtttttgagggttygggtagttattygtattttttygttaygyggagaaagtygagtatataggtygtagggtgggggttygyg

SEQ ID NO: 470 - DNA, 492 bp, Artificial Sequence
  Description of Artificial Sequence: Synthetic polynucleotide
yggtttgggggaataggtagggaaaagggttttttgggttatttattttttttagttttattattgatttttggagaatatttagatggtgttaggtagtattatgtttattattatttttattgagataaaagttagyggttggtaattggtgtttattttttygtttgagtgggttggagaaagayggtatggttggaggaatttgttttgttttgttttggagygggtttttttagttgtattttgtatygggygggtatagtttygggttttgggaagaygtygttyggtagtygtagtggtygttgtattaatgggttttggggtagggaggtgyggagtttagtttgygtttttggttattttttygygtttygtygtygtttatagtttattttttttttttgtagtyggtaggyggtygtaataygggygggtygagtaygtgggygttttygttatatttttatatatatatataygygygyg

SEQ ID NO: 471 - DNA, 450 bp, Artificial Sequence
  Description of Artificial Sequence: Synthetic polynucleotide
ggggaggaygygtygtygtygtygtygttgtygttagggtaggygygygtygygtggagtygggygggtgygagggygygyggyggggggtggggggtaygygtygygyggggggygggggtagtggggggygygygygygggttyggggagttygyggggagagttyggygttyggygtagygyggygyggttaagtttygygtttttttygttttttttyggygygttygttttygtttygtygttygtattygttgggggygtttagaaagatgtatagaggtaayggttaggggagyggaggtttaagttatatgtttgygttttygggggttagagttygttagttttygyggatttyggttygyggttagttygagyggttygggtgagtagyggtatagyggttttttygtttygyggttttygttygtygagaygtggtttt

SEQ ID NO: 472 - DNA, 448 bp, Artificial Sequence
  Description of Artificial Sequence: Synthetic polynucleotide
tygagatttttygtttggggggygttttttttggttttyggagtttttttttttttyggggttttygttttgtyggggggatgtygggtgygttggggtgygtygggaagtayggggatgygyggygttgtaggygyggtttagggtttttygggggtygygtygyggagggggygaagttaggagttggatygtttttgtttttygttttgggggtaatagtttygtttttttagtttagaygttttygagtygttygygggtttttagygggagtygggggtggggtttttaagtattygygtttttatygttttttttygttttyggtttyggtttyggttygygttttagtatygtygttttttgggtttttttyggagtgggagggagtygyggtttygttttygygttygtttttttttaggtttttyggtygtygygtyga

SEQ ID NO: 473 - DNA, 393 bp, Artificial Sequence
  Description of Artificial Sequence: Synthetic polynucleotide
ttygtgyggttagygygtygygtyggyggattttgtagtttagagagtttagggagtttagggaggggagyggggygygggyggggtagtgtygtataatygtaggygygtttygygtygttttygtttygggtttattttttttygtygygttttttttagtttatttayggaygagyggattttygattttygyggtagggatattttaagagttttgtttaggtttgygtygtttagtatttygttygtgtygggggttyggyggtttygggygagagayggaggttaygygtagggttgggygtaggggtygtygttygaggattatgggtgggttagygtttygtygggttgttagttggyggggatygtyggygtttgtgtygggtt

SEQ ID NO: 474 - DNA, 367 bp, Artificial Sequence
  Description of Artificial Sequence: Synthetic polynucleotide
tygggaggagaaattgaggtttagagagttttygygatgttagttaygttttgtaggtygggttttttttaggttattatagyggttggyggagggagygygygttttgttggtttggagggggygggggtygtggyggttttaaagygtttagtttaggygtygyggggtggggyggttttggyggttgyggggygtagggygtagyggttaagyggggttttyggaagtatagttggggtgtttttatttaygattggtygygygttttttttttttygygttagggaaggagyggttgyggttttygtygggyggaggtayggggggygtaygaggggyggaggggatygygtygyggaggaga

SEQ ID NO: 475 - DNA, 519 bp, Artificial Sequence
  Description of Artificial Sequence: Synthetic polynucleotide
gttttggttggttyggggttggtttttgyggttgttygggttgttggaggagggagaggtggyggtttggtyggygygtatttgttgtttttatttttagyggattygygttggggtggtygtyggyggtagyggtttttygggtttatttttaggtttaattagaaattygggagtagttgagagagtttyggagtttygtgtattgtgygttgttttgatttgttaaaaaagaaagtagaaaaatatttaaagtaygttygagaagagaagggggaaatttggggtttgttttttttttagaaaagtygaggtttagggtgagagtttttttgagyggtttttggttgagttagyggagyggggaggttttyggygtttttgygatgagattttatttttaygtyggttgygtttygggattttygygaggattygttyggygggygygygagygagyggggttttttygggttttaagyggtttyggggtyggygtttygtgattttgtyggattt

SEQ ID NO: 476 - DNA, 459 bp, Artificial Sequence
  Description of Artificial Sequence: Synthetic polynucleotide
ggggtygyggttyggagtaggttggggttygtygggatygyggttagagygygttaagtgygtaggaygyggggttggggttttggygtgygtttttygtygygtattagtgtttatttttttaygtatygttygggatggtygtttttagayggtttyggttygyggttattttygttattttygygtaggttttaygtygttttagttgtttttygaggtttttaagaaaatttgggygtygtttttygatygtagttttagttagagtttttygagygyggggtagtygygggtygtttttattyggtygygattygggattygygggtggtatttattttttygaggygtyggyggtagygggaggygagtttttygyggttttygttygagtgygyggggtayggaggagygygygtttttaagattttttttygagatttygttaggtggtgt

SEQ ID NO: 477 - DNA, 384 bp, Artificial Sequence
  Description of Artificial Sequence: Synthetic polynucleotide
gttgayggagaygttatatygygttaggggagtaggagttttttyggagygggaggyggggygtygtgtggttgygagygygttttttggatgtttyggtyggygygggggtgggtgggygttttygttttatttttggtttygggyggttagtygyggtgtgttyggagggttttgygagggttgtgggtggygggygagttttagyggygtagtagaggaggggttttygagygagygtattagggagaagggggttygtgtaaattttaggttgaygatygygtaygygtttttygggttattagttttgtygtttttggtggggtatatygaggagatygtygtggggaatyggggatyggattgtttgatagtygagyg

SEQ ID NO: 478 - DNA, 545 bp, Artificial Sequence
  Description of Artificial Sequence: Synthetic polynucleotide
gggtattygtttagyggttttttaygggagttggggtagaagaygtygygatttygygygggtaatttttttygaggygygttttagttygtggygttgtyggygtagatttygygtggggatyggygaggttaattttttttgyggttyggggtyggtagagtaygtaaggggtygygggtygygtgggtttgggygygtygtggtgggtaagyggggttagyggagygggaattygtatatttttygagyggagtygaggataggttygtgygggtygyggggtttttttggygttaggaagyggyggtygaaggagataaygagaaygtagtttyggtttagggaggtttaaaagttgagatgttgaaygtagayggygggygttygggggttggggggygggtagaggtygttattttttaaaaaggtttttatygagtyggtttttgttttygttygaggggyggaygttygatttyggtattygggattgttygtgggtttttgttggttggggatttttagttttyggttgygygtag

SEQ ID NO: 479 - DNA, 291 bp, Artificial Sequence
  Description of Artificial Sequence: Synthetic polynucleotide
aaygattyggtagtygaggtagygtygygttttaygttygttatygtygtygtygttttagtatatygtaggygtgagtttygtygygatygggagagtttttttagttgtgygttttygaggtatttggtygggyggggaggygtygggtyggggygtataggggttaggygggggygttgttgtttatttttygtttttygggygtgygtttygtttyggagttygtatttygygttygygtttygtttggaagttttggggtatyggaygygtttttttatttttttt

SEQ ID NO: 480 - DNA, 492 bp, Artificial Sequence
  Description of Artificial Sequence: Synthetic polynucleotide
tgggttagtttygtaattttygtttgttttttgttttttttttttttttygagtygyggggttttyggggygygyggattttygttaggggtygtgtaggygyggagttttagtyggtttgttttgggttygaagaaagttgtggtttggagttagttttttttttaygatttttgggggygtttttttttttttttgagttygygatgggaaggygtttttattttattttyggggtttttgagattttttggygaggtggggyggygyggtaggtgtagggttggggagggtttgatagttttggagagtgttygattttagttygtygtygttttttaggyggattttttagaggtaggttttagttttyggygyggggaggyggygygttttagaggggygtagggtgygygggggtygttggtttttygggtattttttttttgyggttttttygttttttttyggagttggtgtttgaggtygttg

SEQ ID NO: 481 - DNA, 381 bp, Artificial Sequence
  Description of Artificial Sequence: Synthetic polynucleotide
tttttaggatttaagttttaagttttyggagttttyggtygaygagttatyggataatgataaggagatttygggyggygggggggaygtyggtaagaagygaaagyggygagtgtttttttttaaggygtagatttaygagttggagyggygttttyggtagtagyggtatttgtyggygttygagygygaatatttggttagttttattygttttaygtttaygtaggttaagatttggttttagaattatygttataagatgaagygygttygggtygagaaaggtatggaggtgaygtttttgttttygtygygtygggtggtygtgttygttttggttagggayggtaaattatgttaygygtttaaagtttagga

SEQ ID NO: 482 - DNA, 430 bp, Artificial Sequence
  Description of Artificial Sequence: Synthetic polynucleotide
gatttttttttgggtattttttttgtyggtttagttttttttttygttttgygatttygtgttttttaagtttygtygyggygattattyggatttatygygggygttaygtygtygtygggtttgygygtttygaggyggagttaggattaggatattygttagygtagggtagtttttagttttygtygttagttygyggtttttgtygygatttygtttattgygggttttttygttygttttygyggtygggaggtttggatttattttygggataaggtgattyggtaagtgygtttaagyggtygttygygattttttygagygagygagygtgyggggyggtgyggygttygtttttgttttttygttgttaggttttttttttttttgttttttttttagygtygttttgttttttaygttt

SEQ ID NO: 483 - DNA, 643 bp, Artificial Sequence
  Description of Artificial Sequence: Synthetic polynucleotide
taggtggagtagtttaagtaggaggtgtttyggttggttygygagagagaygtttataaggttaagtgygagaaattygttaatttyggttttagggaggygggttttattagygatagttttttttttttygagttttttttgtgagtygtggtyggttttggttttygtttttgtttyggttyggattttttgttttaygtttttagttttagattatttyggattttgtttttgtygyggttttagttttgatttgtttgatttgagygagagggaggaagggygygygggtygygggygaygggygggtgygygggygggtaggggattttggttaaggygagagtagygtaygttagygtygttttttagattygagtagagtyggagagagagaygagagggtgggaggtttyggagtaatttttttttaggttgaagggyggygaggtatagtttygagaagttattaaggttatttggagatttttggttttttgaattttgygygttaagtygggatagttgttttgttgttyggagagtagttygygttaggaagagagtaaygaggaaaggagagggattttggygtttyggtaggygagaggygaggttgagygaaagaaggaaggataga

SEQ ID NO: 484 - DNA, 458 bp, Artificial Sequence
  Description of Artificial Sequence: Synthetic polynucleotide
gtgyggaggtggtttygtaggtggygggggagtygggtgagtagygtygttggagtttygttygggggttgggggtyggtgtttagaggtttttyggattygygygggtaygaggatygggtaggggatttgaaagggygggygaagygttyggygtagagttttgggattyggatttgggygttttygtttttygtttttgtaaattatatttttttggagtttatygttttttttttygtttggatttttttagttattttttttaagagttagttaaygagtttgttttttaaataygttggaaggatgtttagaggattttttagaggttgttttygggatgygygggtattygagttttyggtttttttggtattgggtttyggttgygygtttggaaggtggttttttgttttggggttaygttttaaatgygttgtttagggaaggtttta

SEQ ID NO: 485 - DNA, 452 bp, Artificial Sequence
  Description of Artificial Sequence: Synthetic polynucleotide
gtaggygyggatagagtgygyggygygggaaatgygtatttttttygttttygggatttttttttttaygttttygggataaagattttygagygggyggygttyggaaagtagggttygttattttgygtygttttgggaagtgaagagggagygygygtatagggyggttttttttgttggtygggtttagtygaggggagtaataagtgggggygttttgtattgttaagggtagtgttttygtaygtyggggygtagagggggtatgaagaattttggaaattgggtagttttgttygygtaygttttttygtttttgggyggttygatttagtttttaaaggatgygtttttatttgtttaggggtttyggggygtygggaatttggaggaatatggygttgtygttttttggyggaagygttygggtttgygggtaggggtagttt

SEQ ID NO: 486 - DNA, 440 bp, Artificial Sequence
  Description of Artificial Sequence: Synthetic polynucleotide
gygttggaagaaaaatttttygygygtyggtagaattgtagygtttttttttagtgatttygggagtttyggttgtagtyggttttgygygtttttttaaygaataatagaaattgttaattttaataatttagagtaggttaaygaggttttgttttttygattygaattaaaggtttttygtttygtgygttgttaygagyggtgttttttggggttttaatgtagygagttgtgttygaggggttyggaaggygtaagttgggtagygatatggggaaygyggagygggtttyggggtttyggagttttgggttagtatttaygttgttgttgttygtygyggygttattggtygtgtyggaygtattygggygttttttygaggaggaygaggagttagtggtgtyggagttggagygygtttygggataygggat

SEQ ID NO: 487 - DNA, 439 bp, Artificial Sequence
  Description of Artificial Sequence: Synthetic polynucleotide
ygggaggaaagagggtgttttttttttttggggagtyggtttttygtgtattttttgttttygttgttgggaaygtttggtaggttttgaggttttattgggttttagtttttttaatagtataayggagggggttttttaggtttttagttttagttttttyggttgtttatgggggtttygtyggyggtggagggaagtttygttagggggygttgaaggttygtaggttttgygatygttttttttygtagggygtygttttygtttygtttattttgtttygygttaggygtygaaggggtagttaggtaggaagatattygttatygtttgttttagtgttyggatttaaagggaagaaattaaggtttttaggatatttagttgagtggyggaggtygaattygaattygggatygaggtagagggygtttyg

SEQ ID NO: 488 - DNA, 396 bp, Artificial Sequence
  Description of Artificial Sequence: Synthetic polynucleotide
gggagatgttggygttygtygtagtttttygttttatttygggtttyggyggtagyggttgyggygggygttyggtatygtaggtagygyggtttyggttyggtttygattttttttttttatttttatttttatttygtttyggggattyggygyggtygttyggttgtatttyggggyggyggygggggttyggygagyggaygggygygggggagggatygyggygggygygyggggggygyggaggygaggtygagygyggygygtaggggtgttygttttygtyggtttaagyggtttyggtttttatttygtttttttygtaatttttttttttttttygttagtygggtttygtygtygygtygggtygggggygtttygtatygtaga

SEQ ID NO: 489 - DNA, 418 bp, Artificial Sequence
  Description of Artificial Sequence: Synthetic polynucleotide
gaaatgagaagtttttygagtataagygttttttgagggtgggttattttttyggtttttagttttttataatygtyggttataaattgtagtttgggaaygttttagtygtattttagttygttttyggggatygtygttttygaagygtaataataagtaatgtagtttgtttatttattttygtatagatttttagtttttttygttttttagtagaaaygtttaatagaatygttaggattagygagtaygygtattttagtyggtttygtttaataggttygaggyggagaaatygttttagtagttttttygtttygttaygtgtaggyggyggttgttgyggaggygtagygggttggygtggttttttggagygygaggygygttttgttttaaggtttgtatgattgtt

SEQ ID NO: 490 - DNA, 363 bp, Artificial Sequence
  Description of Artificial Sequence: Synthetic polynucleotide
aygyggatttggagygyggttattgygttatygtagygatttgggttatttaagtyggygggattgagaggtygttgygygtgggtaggggtttagattgygttygyggtgtttgtttyggtttttatttyggaaygattgtagttttgyggggttygtygtttatatygygttgaggaygttgtttaagttaggygttygttttygttygyggttttagtygttygtagygygtygtttttagaygygygtggttgttggygagggttgagatygygttttygtyggttagtttttagtagtagygtattttttttgtttygygttttygtttyggattygygtygtygtagtttygyggtg

SEQ ID NO: 491 - DNA, 371 bp, Artificial Sequence
  Description of Artificial Sequence: Synthetic polynucleotide
gyggtygttatygtyggyggttygygttggygttygttttttygygggygttttagattyggggatygttatttggtagygttygtaggttaygggygttygtygttttyggaatyggyggaagggayggggtggggggagyggaggggyggggaggggaagaagagyggtatygggygggtttttygtygtagggtttttttttyggttatygtagattttttgatttttygtttttttygtttttygttatttaaagygtagygagtygyggyggygaggygagattaagyggtaagttagtgtagyggygagyggyggggtttyggtttttgatygagttgyggygaygtttygtgtttttttttygt

SEQ ID NO: 492 - DNA, 397 bp, Artificial Sequence
  Description of Artificial Sequence: Synthetic polynucleotide
gtaaataygygtagttggatygggttgygggttttggttgagtggtgttggtttgygttttggygttgygttyggggygygygtattttttaygaggatgygygtygagtyggagtattggtygaaggggttggtgaygttgatgttgtattggtttaggtttgttagttygtygtygygtattattagtgttattaygttagggttttygaagaygtagyggtatttgggatygttaygtagttttttgtygtttttattttagyggatgaatgggttygggaaagtygaaatgyggtaagtgagtttggtygygttgttttygattagtattaygttttttagyggttttagtattygyggyggttttttttygygtagtttttttygggattta

SEQ ID NO: 493 - DNA, 366 bp, Artificial Sequence
  Description of Artificial Sequence: Synthetic polynucleotide
ttagtttttttttagtyggttggtgggyggttgggagtggggatattggatyggaggggattttttaygggagtattygttgtttttattygtttyggaaygyggttggattyggagttttygatygtagttygygtaygattttygggagtttgttttygyggtygtygatttaygttygygttgtygttttattgttaggtggttygagagatgtaggaggaaggaggggygygyggggygggyggaggagggtggagtygtyggygygttttttttttygggtyggtaggygggyggygyggygggttyggygyggyggtagaggaggyggygggygttgggagatatyggaygttygttygg

SEQ ID NO: 494 - DNA, 907 bp, Artificial Sequence
  Description of Artificial Sequence: Synthetic polynucleotide
gtttagtttygttagttttyggttggtggtygtgagttyggttygtaggttggttattttttggttggtygattggatygttttatygatgyggagygygagttgtttattgttttttattatgtttaggattttggtttgggggygagagaggtgataaagagttgtatgatgygyggggggygygyggtygggtattttyggttttatttgttgtgtttttygyggttyggtttygttygygtttygatttttaggtatyggtagygtyggttttttyggtataggaatgatagyggygtttttagttttagtygyggyggtggygaggyggyggggggaggaggyggaggagaaaaaagaggaggagaaggaggaggaggagtagygatygtygagatttyggygggygggygtygagagttgttttaagaaggatatygygygttattaggtattttttaaatggagtttattattygtygtyggttygggagggggtttyggtyggaggttgggggtatttttggtttttygygttttygtatttyggagatatatttttygggggggyggaggyggyggayggtagtygggagggggttaaggtggygtttttggygaggggtaggggtygtttggatygaggtyggttttttgtttttttttttgagyggtggggtagttttygttttggagaattggtgtttygagtygtgttaaggttggggaggtgttgggtgttyggaagagagggtgtttggaaagggggttttagaggggagtyggggtggatttttatggaagggagaygtttgygttagtttaggagtggagttygtgttttatyggttttttaaattgygagtaygaaatttttagaggggagttgagttggtgtttygyg

SEQ ID NO: 495 - DNA, 562 bp, Artificial Sequence
  Description of Artificial Sequence: Synthetic polynucleotide
tgtaagttygttttyggttaygygygtttttygggttttggtttygtatttttgtygtygtttttaygygtttttayggatttygygygtttttttttttyggatygygagygtatttatygatttygattgtttyggttygtttygaagttttygygttgtagtttttagttttaggagtagggtttttgggtttaygtttttaaggtaattattttttaggttggttgtgaygttataaaggtygyggaggttgggygtttgagggttgggtttgygggtygygggatagggagggygyggggtygggttgttgggttygagttttgggtaygatgttttttttgaygtygttaggatagygtttggtttaggtttgggtttggtgaaygygggtttttttttttgaggtttaatatttygtatttgggttggttttttttattttgattggtttattygttaygtgttaagtattgaagagggygtgtaggatggatatttttggagtaaaaatagttttgttttttttttggggagggatygtattttttagaggggt

SEQ ID NO: 496 - DNA, 563 bp, Artificial Sequence
  Description of Artificial Sequence: Synthetic polynucleotide
tttgggggygggtaagggatagggaggttgtygggattayggatgggtagttayggtggagygtyggygaygygyggaggagtttagttygagtggggttygtttgtattggygtygtyggtttggygggaygagttttyggyggtggyggaggtggygttagggttttygttttygatggagttttygttgttygtgttgtygtttgatagtaggygygttattygtaagtyggtttgtagggtgygtaygtygttgtygaagttgagttygtttaggtygttaataagttgygatagtttagtttttatgtyggaggygttgtttagtagtagaggyggyggttyggttttygggtttagggagttttygtygttttttagygtttttttayggttattttttagagtatttaataagttttygtatttaaagtgtatggygattattagygtaygttgygtttyggtttttttttttgttggatttttttttgtygtayggttttttttttttttygggtagttttygggttgttttttttttttttttttttgtagttt

SEQ ID NO: 497 - DNA, 509 bp, Artificial Sequence
  Description of Artificial Sequence: Synthetic polynucleotide
tagttygggttgtagtygygygyggagttygagggggtygagtatygtgtaggggyggggayggygtttttttttttttggaygttttttygattgygttygtagggatttygttttygtygygtttttygtygtgtttygtttygggttgygttygtagttttttattttagtgttygttygggaattygggagtttttygygtyggggttaaygtgyggygtttttygtyggttatagygggygggagaygygaggyggygygggagtaggggaaggaggggaaggagygggggaggaggggayggaygaaggtagtaygtagtgggyggyggtagggyggaaggagttgagaaagggatyggttyggaagaatttgaatttttgttyggtttttttttttyggtygggagttyggtttttgtaggtagtaagyggtttgttagtatttattatggttaggtttyggttaygygttttgttagtattattttatattygttttygat

SEQ ID NO: 498 - DNA, 442 bp, Artificial Sequence
  Description of Artificial Sequence: Synthetic polynucleotide
ttagaagggaatttaaattatggtagygtttagaggtatyggttttagttttattggatgtgtgtgggtygaggttttygggtaagggygagattttygtygtgtgggggttttygaaygygttttttygattygggtattagygaagtgtttaagaagtgttattggttatttaygtttagtagttttaygttgggtgtagygttttagttttttttaattttttygtgtygtttttyggttaggttggttggtygtgggygttttatttttaggaagtygtygttttgatagtygatggagatttggtygtagtggatggtaatgaatttttygggttygttgatgaagaaggttgygtagtgtagttgyggtyggtyggyggtgaaggtgaattggttttggaggtttagtatgtttaggtattttgggggaggagggt

SEQ ID NO: 499 - DNA, 441 bp, Artificial Sequence
  Description of Artificial Sequence: Synthetic polynucleotide
atygtygtygttatygagygtggtygygygggtgtttagtagtagtaggtygtygtttttggyggttgtygagtttagtagtattttgtttyggtyggattttatattttttatgtygttgtttaagygtttttygttygtygtygtygtygttgygtygttttttatttagagttyggyggygtygttttttttttttttygygtggtggyggggtatggtattattaygggtatygygagggggtygttagygtttgyggygggggtagyggttttatgtgygtyggygggttttaaggaggaagtyggyggtygayggggygttygttagttagagatttttgagtygggggyggggaagtaggtagttagtaaatygttygggtttyggggygggaaaggaggggttgtagaggaggtygaggagttttaattttta

SEQ ID NO: 500 - DNA, 410 bp, Artificial Sequence
  Description of Artificial Sequence: Synthetic polynucleotide
gggataagygggtagtatgtttagggyggtygggagtttattgygttttggtygygggttaatagttygttgyggtttyggggygtttttygaggttaygygayggttygtatyggttttttygtttyggggttttttttgttattttagyggyggggtttttagtaattttgggttttaaggttayggtgagttagggtttygayggggaggttttgggagggaggaggttgygggagggtagygaggggtyggttygggagtyggtttgagggygygttgattttttgtgtyggtgygttagttttygygtttatttgggttgttttygttgtaggggagatttatygagtttttaygtagygtaggttttygtagttygataagaaaattttgttgtggatagggyg

SEQ ID NO: 501 - DNA, 424 bp, Artificial Sequence
  Description of Artificial Sequence: Synthetic polynucleotide
tgcgggcgttcggtttcgggtttttttcgtttttggggcggtttacgggttttttgggacggggttgcggtcggaggagattgaggagatcgggcgacgacgcgtttcgcgggcgtagagaggtcgcggtagttttgtttcggcgtagggagttttggagtggtggagttgtagttggttcgaggcgggagttcggggagaggcggggtttttcgtatttagttattttgtatgtgtgttcgtatttatattttttatacgcgtgtcgttttatttttttttttttttcgtatttcggttttgcgatcgggggtcggggggacgcggggattcggttagggttgaggagggaggcgcggggttgtagagatggcgtggaagttttgggtttcgtgttgtttttcgtttcgtttcgttcgggggt

SEQ ID NO: 502 - DNA, 581 bp, Artificial Sequence
  Description of Artificial Sequence: Synthetic polynucleotide
cgggtaggatgggtcggtgagttcggggatgtagtttaagtagggcgggggttaaatttgggaggttgtggattgtagcgggttttagaggaggggaggtttttggaaggatcggcgcgatttttttgaacgaatatcgcggttttttcgaacgtcgcggttttttcgaacgtcgcggttttttcgaatatcgcggtgttttcgaatatcgttgttttttcgaatatcgcgattttttcgaatatcgtgatttttttagatatgtttagttgaaggtatttagtttttttcggtggttttttttcgtcgggttcgttttttgcggttgttgtttgttttttaggttaggaggtttttggaaggatcggtgttgttttttcgaatatcgtggttttttcgaatatcgcggttttttcgaatatcgtttttttttcgagtaacgcgattttttcgaatatcgcggttttttcgaaaatcgcgattttttcgaatattgttattttatcgaatatcgcgatttcgtcgaatatgttcggttgaaggtatttagttttttttcgcggttttttttcgtcgggttt

SEQ ID NO: 503 - DNA, 656 bp, Artificial Sequence
  Description of Artificial Sequence: Synthetic polynucleotide
attaaagtatttgggatggttttattgtattagatttaagggaacgagttggagtttttgaatcgttcgtagtttaagatttttttggagcggtttttgggcgaggtgtatttggatagtagtaagttcgtcgtgtataattatttcgagggcgtcgtttacgagtttaacgtcgcggtcgtcgttaacgcgtaggtttacggttagatcggttttttttacggtttcgggtttgaggttgcggcgttcggttttaacggtttggggggtttttttttatttaatagcgtgttttcgagttcgttgatgttattgtattcgtcgtcgtagttgtcgttttttttgtagttttacggttagtaggtgttttattatttggagaacgagtttagcggttatacggtgcgcgaggtcggttcgtcggtattttataggtattcgcgttcgcgtcgttcgtcggggtggtcgtcgcgttcggtaggagggagggagggagggagggagaagggagagtttagggagttgcgggagtcgcgggacgcgcgattcgagggtgcgcgtagggagttcggggcgcgcggtttagttcgggggttttgcgtgtagttcgcgttgcgtttagagttaagttttttcgtcgggtagttgaaaaaaat

SEQ ID NO: 504 - DNA, 651 bp, Artificial Sequence
  Description of Artificial Sequence: Synthetic polynucleotide
tttttacgttcgttcgtcgtttcgtgggtgcgtacgcgtgttcgcgtaggtttttcgtttggcgagtgtaaggttttttttcgtcgtgttgttttttagttttttagtaaattacgaatatcgaaagaagttacggcggcgacgggaggggcgtcgcgcgtgtttttttcggcgataaagcgggagtcgggcgcgtcggtcgagggcgttcggcgtagagtttcgtagaggcggacgtcgcggtacgcgtttcgaaaagttttaaatttttattttcggttttttcgttttattttcgtttcgtagttaagattcgcgtcgtggcgggttcgacggttaaggaaagtttattagtttttcgtatcgtgggcgacgggttaagattcggttttaaacggttagatttagtttttagtcggttgtcgttttcgttttacgtaggcgcgtttcggggttttttttttttttatcgcgcgttcgcggggttcgacgggggcggagcgattttcggaaggggcgtggcgatcgggttcgacgcgcgtacgcgttttggagttttacggttacgtgtcgggttacgtgatgtttatttcgaaagtttttcgtgaagtaataggacgttaaaaaaaaattttttttttgcggggtgga

SEQ ID NO: 505 - DNA, 564 bp, Artificial Sequence
  Description of Artificial Sequence: Synthetic polynucleotide
tttcggttcgattttcgtcggggcggttttttttttcgtttgggatggtggggagggcgggaaggttacggtcgggcgggatcgagcgtcggggggattgggaggttaggagggcgtataaaggaggtgtcgggtcgggtttgcggcgggcgggcgggtcggggtggattcgtcggtgtcggacgttttttgttcggtcgggatttcgcgtcgttggcgtttaagttggcgcgttgcggagggttgcggggtgagttttgcggtttttttagtttcggcggttatattttcgagaggtcggcgggggttgcgcggattcggtggttttcgtcgagttttttcgagagtaggtttacgtcgcgtcgtcggtttggaggacgcgtgtgttcggcgcgggtttcgttttttcgttcggtttttcgagtttgttttgcgcggatttttatcgtttcgcgttcgggagtttttttttttcgtgaggattaaagcggggtttcgtggttggggagttggtgtagttgtttaatattaagtggaagttagtgtggggttcgttagtttaaa

SEQ ID NO: 506 - DNA, 495 bp, Artificial Sequence
  Description of Artificial Sequence: Synthetic polynucleotide
tgtagtttttatttcgagcgcgtagttttacgtagtttttttatattttttttagcgtttgtagtattttttagtgcgtatagttttgttagtagtttttcggcgcgtcgtttttgtatcgtttcgggttataattttgttggcgattaagtttgaagaattttttgtggttttatttttttttttaggtttagttttagttttgatattttaattaaaaggttatacgttaattaacgaggtattaaaggggaagattttagttgaaagaaatgattgtaggaagtgtgttagggaagttaacggaatcgttggttcgtcggtggtgcgttcggtattaggaaagtttttacgatcgttgaggtatcgggtagttagtgttcgttgttaacgcggagggaacgggcggagattgcgggtaatacgtggtagagtcggcgtgagttcggtgggtttgattttagagttttaggttgacgttatttttttggtacg

SEQ ID NO: 507 - DNA, 710 bp, Artificial Sequence
  Description of Artificial Sequence: Synthetic polynucleotide
tagtagaaagttggtttagagatagggtagaagaatcggggggttgggcggttgaggtcgggaggtgggagaggcgggttttgtagtttcgagagtttttcgcggttgtagcggtagttgttattttttggtttcgttttatagtatatttgagttttttgggtagtttcgagtttatagtttttagtagaggcgttaattgttttttttaagtataggtcgtcgcgtttttaattttttgtttttatttcggttcgttcgttttttttttcgttttttttcgattgtagcgggggtagcgttttggcgtttttaaggatttttcgttattttttttataaagtagcggcggtggcggcggttgttgttggatttttatattgtagttagtagtttaggacgttttcggtcggacgatgggtattcgcgtttgagtatttttcgggtaggcgttaggcgcgaaggtagggggcgggaggaaaggggcgggggaatttttgattttttggtggattttggaagttgtttttaaataaatatatcgttggttcgcggttgagtagttatttcgttagagtagtatgtggattggttcgtcgggtttttttcgtgttttgtgttgtcgtcgtcgtcgtttttgttagagtagtagttgtcggtagtaggagtttcgtacggggcgcggagtagggacgcgttgttatcgtttt

SEQ ID NO: 508 - DNA, 586 bp, Artificial Sequence
  Description of Artificial Sequence: Synthetic polynucleotide
gatagtgttcggtaagcgggggttttcgttgaagtttcggaattggggagggggcgtttcgggacgtcgggggcgtcgtagggttagtttttgtgtcgcgtttcggggttgtgagttaaaaatatttagtatttcggcgtcgggattcggtttttagtgttgggtaagttggggtcgtcgggggatcggggacgagattgcgttcgggtttttgtgcggggttcgggggtcgtgattaagagatttagtatttcgggttaggtacgcggtttttggtgttcggtgagcgcgggttgttggggcgcgggcgcgggcggtttgggtttggtttttgcggggagttttcgggttgtgttttggggttaacgttttgattttcggggtcggtagtaggttgatcgtgttgggtgagttttcgcgggattattcgggcggcgggatttaggtggaaggcggcggttgtttcgcggtattcggttcggttttgtgttgggagatttgggttgggtttttagggtgggtaggagttcggggagttttagaggtttgtatgcgggggtgtattttcgtgtttttacgagtagta

SEQ ID NO: 509 - DNA, 466 bp, Artificial Sequence
  Description of Artificial Sequence: Synthetic polynucleotide
tggtttttgttattttcgtcgtcgtcgtttgggttttttgagttaagggtcgggacgagggagggggaggcggataaagggtcggggtcggggagaatcgcgcgtcgggaatttatttggggcgtagttttatcgatttttcggttattcgtttttattaggtaagttaggtttttttatgttttgagttttaaggattttgttcgaggggttttcggggatttgggggcggttttttaatggagggtgcgatagggaaagtttcgagttcgttttttttgggaaattacgcgtatatttaggattttattttggtttggtcggagtggggatgaggtgcgagtcgttgcggggtcggtggagtcgggatgttaagtttattttttagtcgtcgcgggttttttcggtttggggcgtttttaatggatttcggggtcggtttgagttttttcggagcgttcggcgg

SEQ ID NO: 510 - DNA, 587 bp, Artificial Sequence
  Description of Artificial Sequence: Synthetic polynucleotide
ttagcgcgtttggcggcggcgagcgcggcgatatcgcgggagcggaggttcggtttagagggcgggcggtagagggtaaggatcgggtttggggagttttcgggcggtggtcgttgagggttcggacgcgttattttcgagttcggggtgcggttttttttcgggcgttttcggcgtggggcgcgcgttttcggggttttttggggaagagtcggtttttcgcgtcgtacgttgggagtttgatttgttttttttagattatgtgggttttttatttgtatattttcgaattatagatgaaaacgtatttaggattaagtgaattgtttttttttgagtttttttgggatagaaaaggaagtaggttttcgttttagtttcgttcgttttttattttcggcgttttcgcgtacgtttttttggggacgtcgtttgcgttcgtgtttcgcggggaagagttgtatttgggttcgtagcgttagtttagtttgcggtaggcggagggggtttagggtttagttaattatttcgttacgtcgtataggagttagtcggggttttcggttcgggagttgtcgtttatttat

SEQ ID NO: 511 - DNA, 459 bp, Artificial Sequence
  Description of Artificial Sequence: Synthetic polynucleotide
tcgcgttggttattttattttcgttcggtcgatgtttaagtcgacggttgtttttaattttcgttggttgtgatttttatgcgggcgtttcgcggttaggcgtgtgtgtttcgatcggttaaggtaggtcgggcggaggatttggtttatcggagaggttacgtcgggggttgaggcggtttagagggttattaattaaatttttcggcggggcgggttcgggggcggggcgtttttttggtttcgtttttcggtttattgttttacgttgtttttttcgaggcgtttcgttgagggcggcgtgtggagagtttggggtgtttgtcgtcggttgcggtggggtcgggttggaggtcgcgggtgaggtttgtggttaatttcgcgttgtcgaggttttattttttcgagtttagtttgattttaggtcgtttttaggtcggtgtttagttgaggcgggaa

SEQ ID NO: 512 - DNA, 524 bp, Artificial Sequence
  Description of Artificial Sequence: Synthetic polynucleotide
gttgtcggttcgtggtcggggagtaaaggttggttcgtcgcgttagggtttttttcgaattttcggaggtgtggttttttcgtagcgcggtttcggttttcggttttcgttagtcgtttttatttttttgggagcgagcggtttcggaggagggaagcggcggcggcgtttttaagagatagtttggagtaggcgtttttgttgtaggttgcgtgttgtttcggggcggtggtatttttttttttcggttttaatcgttaggtttgtcgtttgcgttttttaggggttagttcggagttagagaagtttcgttttgggttaggcgtagggtttagttcggaatagttttattttttcggttgggtatcgttttttataaagataggcgtttattttcgattttcgaggttaggtaaaggttacgagtttttagagtttggatcgatgttaaaagttgttgcgtttttttgtaggttttagttttttttttcgtagtttttaattttttttgacgtagattttag

SEQ ID NO: 513 - DNA, 530 bp, Artificial Sequence
  Description of Artificial Sequence: Synthetic polynucleotide
gaggaggaagcgagcgttttcgagtttcgagttcgagttttcgagtttgagtcgtaatcgttgcggtattttgtttcggattcgtgtgcgcgggttgcgtcgagcgttgggtaggaggtttcgttttgttttggttgtaagtagcggttgggagtagtcggtttttggggaatatgcggcgcgcgtggattttgtttattttgggtttggtggtttgcgtgtcggcggagtcggtgagtgggttaggcggaggatgcgcgcgtcgtttagggtgtttgaagttacgagaggagttcgtagggaataggggagcgttatttggggaatttttagtttttaagtatatatcggagattcgttgggataaatgcgttcgttcggttattttttttttttttttttttttttagaaaagcgttgttcgttggcgttatttcgcggttcgcgggaatgggggtatcgagaattgcggtttggtttagtcgtagaggtttttgaagttatttttaattttttcgttttcggcgggt

SEQ ID NO: 514 - DNA, 465 bp, Artificial Sequence
  Description of Artificial Sequence: Synthetic polynucleotide
ggtggtatacggtgtgtggggtttggggaggcgattgttacgttttttagaatttttatgttttttattcgtttgcgatttcggttgtcgaggaggtaacgagggaggtcgagtcgttttttttcgtgggcggtagcgaaattttgcgttcgtacgtcggggtgtcgtcgagttcggttttgagtatttagtaaggttaagtaggcgaaggagggggcgggggtttttgggcgcgttttcgttcgcgtatagtcggggttttggaagggggtgtgcgtagttcgtcgagttagtttcgttcgtttgtcgttcgcgttcggttttcggaggcggacgttgcgcgcgttcggggatttcggagcgttcggcgttttacgtttttttttcggttcgttagttgttttttggcgttgtttttagatttgttgcgtttcgatttggggggtagaaggttggttcgggaga

SEQ ID NO: 515 - DNA, 454 bp, Artificial Sequence
  Description of Artificial Sequence: Synthetic polynucleotide
taattcgggggagaatggtatcggcgattgggtttcgcggttcgtgtttatcgaggagttttcgggcggtggcggcgtggtttttagcgcggtttttattcgtttttcgggatcgtagcgttgtagggagtagagcgattgggtatcggacgtggaagttttggggtttttgcgtttcgggggcgtggtaggttcggttttggtttaggtgcgagtgcgggagttgcgtaagggcgaagcggagcggggcggcgcgggcggtggcgggaagttttttttattttgcgtttgggatgggcgcgcgtggtattattacggcgtcgtcggcggttttttgttgcgcgttcgttcgcggttgtacggtttaggcggggatttgttgttttttgcgtggttgcgggcgttcggggcgtttttgttgttagttttgtcggttttgtttagcggtttgcgt

SEQ ID NO: 516 - DNA, 380 bp, Artificial Sequence
  Description of Artificial Sequence: Synthetic polynucleotide
gtttggtcgtttttttatttttgtcggtttttcgggtcgcggatttcgcgcggcgtcgggcgatgttggtttgttcgtggttattatttcgttttattttcgtttttttgggtcgtcgtattcgtttacgtgttcgtttttttttgcgtaaaattttaagatgagtaaatattgggtttacggtggagcgtcgcgggggtttttttgagtcggggcgggtcgggggcgggattagggttcggtcggggcgtgttcgaggggagggatttttcggtttgcgattcggcgttgttcgcggtgtttagcgttcgttcgggcgcgttatggggaatcgtagtatcgcggacgcggacgggttgttggttgggcgcgggtcggtt

SEQ ID NO: 517 - DNA, 357 bp, Artificial Sequence
  Description of Artificial Sequence: Synthetic polynucleotide
cggatattttcgggtttatcgtcgtttttttcgttttttgttgtttttaaagttttattatatttttgggtcgggcggtaggagtggggacgggagtggaggttttgcggagtagcggttcggggagttgtgggttgcgggttgggcggggcggcgcgatgcggggcgggcggtttagtttcgttttttttatcggcgtttttaggggatgaatgttttttttgacggtttttttatttattgatggattaattttgttcgttaattttttagttttcgttaaaaatgaaaaggagtcgtttgtgtttgtataaatttaagagttaggatggatgtgcgggggtggggcgggcggcg

SEQ ID NO: 518 - DNA, 421 bp, Artificial Sequence
  Description of Artificial Sequence: Synthetic polynucleotide
tgtttcgttttttttttttttttttttttttgttttttttttttttttttttttattattgtttttttttttcgttttttatttttttgtagcgttaagtcggttttttaatttggtttgttgaacgtaaatcgttgagagtttgttgtatcgttttttggggtttttggttgtcgagtttcgttaaggtaaagacgttagtaagcgaggaagcgtagcggaagaaaaataagcgggcgcgcgaggggagttttaggagggttgtcgagtggttggtaggcggttttcgtttttttcgggtggtttcgtcggcggttgacggttcggaggacgcgcgtttcgaaaagttagatttcgggcggcggcgcgttacgtcgcgttttttcgcgtttttttttcgttgcgtttcgggaaaggaatt

SEQ ID NO: 519 - DNA, 435 bp, Artificial Sequence
  Description of Artificial Sequence: Synthetic polynucleotide
cgcggatttttattttgcggtttgtgtgttcggtttttttcgcgtggcggggaagtgcgggtggttgttcgggtttttagaggtcgtattatttattgtgttttaggttcgtaggaagttagattttgcgagaggtgtgtgggggcggagagtggtataggtttgatattgtaggtcggaggaggaagatagtggttgtaaaggtaaaatcgggtgttatttttttaagagtttttttagcgtgagtgtcggggttagttcgaattggagtttgtaatttgtgagtgcgagtggggagtagtaggagattttttttataggtgaggtttaggaacgagtttggtcgtgttaggtaaggttttttttattgttagtttgtgtttatttatttttgtttttttagattgtataatttcgtgtcggttttattattcg

SEQ ID NO: 520 - DNA, 492 bp, Artificial Sequence
  Description of Artificial Sequence: Synthetic polynucleotide
cgcgcgcgtgtgtgtatgtgtgagggtgtgacggaggcgtttacgtgttcggttcgttcgtgttacggtcgtttatcggttgtagaggagaagggtaggttgtgggcggcggcggggcgcggaggggtagttaggagcgtaggttgggtttcgtatttttttgttttaaaatttattgatgtagcggttattgcggttgtcgagcggcgtttttttagagttcggggttgtgttcgttcgatgtaggatgtaattgaggaagttcgttttaaagtaaaataaaataaatttttttagttatgtcgtttttttttaatttatttaagcgaaagaatggatattagttattagtcgttgatttttgttttagtgagaataataataggtatggtgttatttggtattatttgaatattttttaagagttagtaatgggattagaaaaaatgggtgatttaaagaatttttttttttatttatttttttaagtcg

SEQ ID NO: 521 - DNA, 450 bp, Artificial Sequence
  Description of Artificial Sequence: Synthetic polynucleotide
ggagttacgtttcggcgagcgggggtcgcggagcgagggggtcgttgtgtcgttatttattcgagtcgttcgggttggtcgcgagtcgggattcgcgagggttggcgggttttggttttcgaggacgtagatatgtggtttgaattttcgtttttttagtcgttgtttttgtgtatttttttgggcgtttttagcgaatgcgagcggcgaggcgagggcgagcgcgtcgaggaagggcgggagaggcgcggagtttggtcgcgtcgcgttgcgtcgagcgtcgggtttttttcgcgagtttttcgggttcgcgcgcgcgttttttattgttttcgtttttcgcgcggcgcgtgttttttatttttcgtcgcgcgttttcgtattcgttcggttttacgcggcgcgcgtttgttttggcggtagcggcggcggcggcggcgcgtttttttt

SEQ ID NO: 522 - DNA, 448 bp, Artificial Sequence
  Description of Artificial Sequence: Synthetic polynucleotide
tcggcgcggcggtcgaggggtttgggagggaacgggcgcggaggcgggatcgcggtttttttttatttcggggggagtttaggaggcggcggtgttggagcgcgagtcggagtcggagtcggagacgaagagaggcggtgagaacgcgggtgtttagggattttattttcggttttcgttgggggttcgcgagcggttcggggacgtttgggttggggaagcggggttgttatttttagggcgggaggtagagacgatttagtttttggtttcgtttttttcgcgacgcgattttcgaggggttttgggtcgcgtttgtagcgtcgcgtattttcgtgtttttcggcgtattttagcgtattcggtattttttcggtagggcgagggtttcgggggaagggaaggtttcgggagttaaggagggcgttttttaggcggagagtttcgg

SEQ ID NO: 523 - DNA, 393 bp, Artificial Sequence
  Description of Artificial Sequence: Synthetic polynucleotide
ggttcggtataggcgtcggcggttttcgttagttagtagttcggcgaggcgttggtttatttatggttttcgggcggcggtttttgcgtttagttttgcgcgtagttttcgtttttcgttcggggtcgtcgagttttcgatacgggcgagatgttgaacggcgtaggtttggataaagtttttaagatgtttttgtcgcggaggtcgaggattcgttcgttcgtgggtgagttgggaggggcgcggcgagggagggtgggttcggggcgggggcggcgcggggcgcgtttgcggttatgcgatattgtttcgttcgcgtttcgtttttttttttgggttttttgggttttttgggttgtaggattcgtcgacgcggcgcgttggtcgtacggg

SEQ ID NO: 524 - DNA, 367 bp, Artificial Sequence
  Description of Artificial Sequence: Synthetic polynucleotide
tttttttcgcgacgcggtttttttcgtttttcgtacgtttttcgtgttttcgttcggcgggggtcgtagtcgttttttttttggcgcgggagagaaaaggcgcgcggttagtcgtaggtggagatattttagttgtgttttcggggatttcgtttggtcgttgcgttttgcgtttcgtagtcgttagagtcgttttatttcgcgacgtttgggttgggcgttttaaagtcgttacggttttcgttttttttaggttagtaaggcgcgcgtttttttcgttagtcgttatggtggtttgggaaaggttcggtttgtagaacgtaattgatatcgcggaggttttttgggttttagttttttttttcga

SEQ ID NO: 525 - DNA, 519 bp, Artificial Sequence
  Description of Artificial Sequence: Synthetic polynucleotide
gagttcggtagggttacgaggcgtcggtttcggggtcgtttgaaattcgaagagatttcgttcgttcgcgcgttcgtcggacgaattttcgcggaggtttcggggcgtagtcggcgtgagggtggggttttatcgtaggggcgtcgggagttttttcgtttcgttagtttaattaaggatcgtttagaggggtttttattttgaatttcggtttttttaaaggaagggtagattttagatttttttttttttttttcgaacgtgttttgggtgtttttttgtttttttttttggtaagttaggatagcgtatagtgtacggagtttcgaagtttttttagttattttcggatttttggttaaatttgagggtgagttcgaaagatcgttgtcgtcggcggttattttagcgcgggttcgttgagaatggaaatagtaagtgcgcgtcggttaggtcgttattttttttttttttaatagttcgggtagtcgtaggggttagtttcgggttagttagggt

SEQ ID NO: 526 - DNA, 459 bp, Artificial Sequence
  Description of Artificial Sequence: Synthetic polynucleotide
atattatttggcggagtttcggggaagagttttaaaggcgcgcgttttttcgtgtttcgcgtattcgaacgggagtcgcggagagttcgtttttcgttgtcgtcggcgtttcggggaggtaagtgttattcgcggatttcgagtcgcggtcgggtgggggcggttcgcggttgtttcgcgttcgggaagttttggttggggttgcggtcggagggcggcgtttaagtttttttgaaggtttcggagggtagttggagcggcgtagagtttgcgcggggatggcgggggtggtcgcgggtcggggtcgtttgggggcggttatttcgggcggtgcgtggaaaagtaggtattggtgcgcggcgaggggcgtacgttagagttttagtttcgcgttttgcgtatttggcgcgttttggtcgcggtttcggcgagttttagtttgtttcgggtcgcgatttt

SEQ ID NO: 527 - DNA, 384 bp, Artificial Sequence
  Description of Artificial Sequence: Synthetic polynucleotide
cgttcggttgttaggtaattcggttttcggttttttacggcggttttttcggtgtgttttattaagagcgatagggttggtgattcgaggggcgcgtgcgcggtcgttagtttgggatttgtacggatttttttttttttagtacgttcgttcgggggttttttttttgttacgtcgttggggttcgttcgttatttatagttttcgtagagtttttcgggtatatcgcggttggtcgttcggggttaaggatggggcgggagcgtttatttattttcgcgtcggtcggggtatttaagaggcgcgttcgtagttatacggcgtttcgtttttcgtttcgaaaaagtttttgtttttttggcgcggtgtggcgttttcgttagt

SEQ ID NO: 528 - DNA, 545 bp, Artificial Sequence
  Description of Artificial Sequence: Synthetic polynucleotide
ttgcgcgtagtcgggggttgggggtttttagttagtagggatttacgggtagtttcgggtgtcgggatcgggcgttcgtttttcgggcgggagtagaggtcggttcgatggagatttttttgagaaatggcggtttttattcgttttttagttttcgagcgttcgtcgtttgcgtttagtattttagtttttaagtttttttgagtcggggttgcgttttcgttgtttttttcggtcgtcgttttttggcgttagagggatttcgcggttcgtacgggtttgttttcggtttcgttcggagggtgtgcgggttttcgtttcgttggtttcgtttgtttattacggcgcgtttaaatttacgcggttcgcggttttttgcgtgttttgtcgatttcgggtcgtaggaggggttagtttcgtcggtttttacgcggggtttgcgtcggtagcgttacgggttggaacgcgtttcgggagaaattattcgcgcggggtcgcggcgttttttgttttaattttcgtagggagtcgttaggcgggtgttt

SEQ ID NO: 529 - DNA, 291 bp, Artificial Sequence
  Description of Artificial Sequence: Synthetic polynucleotide
gagaagggtggaggagcgcgttcggtgttttaaggtttttaggcggagcgcgggcgcgaggtgcgggtttcggggcggagcgtacgttcgggaggcgggaagtgggtagtagcgttttcgtttggtttttgtgcgtttcgattcgacgttttttcgttcgattaggtgtttcgagagcgtatagttgggagggttttttcggtcgcggcgagatttacgtttgcggtgtgttagggcggcggcgacggtgacgggcgtggggcgcggcgttgtttcggttgtcgggtcgtt

SEQ ID NO: 530 - DNA, 492 bp, Artificial Sequence
  Description of Artificial Sequence: Synthetic polynucleotide
tagcgattttaggtattagtttcgaaggagggcggggagatcgtaaaggggaagtgttcggagggttaacggttttcgcgtattttgcgtttttttgaagcgcgtcgttttttcgcgtcggggattgggatttgtttttggggaattcgtttagaagacggcggcggattggggtcgggtattttttagggttgttaggttttttttagttttgtatttgtcgcgtcgttttatttcgttaggaagttttagagatttcggggatggggtgggagcgtttttttatcgcgggtttaaaaagaaggaaggacgtttttaggggtcgtagaaggaggattagttttaagttataatttttttcggatttaaggtaggtcggttggggtttcgcgtttatacggtttttggcgggggttcgcgcgtttcgggagtttcgcggttcggggaggaaagaggagataagagataggcgaggattacggggttgattta

SEQ ID NO: 531 - DNA, 381 bp, Artificial Sequence
  Description of Artificial Sequence: Synthetic polynucleotide
ttttgggttttgagcgcgtgatatggtttgtcgtttttgattaagacgggtacggttattcggcgcggcgagggtaggggcgttatttttatatttttttcggttcgggcgcgttttattttgtagcggtggttttggaattagattttgatttgcgtgggcgtgaggcggatgaggttggttaggtgttcgcgttcgggcgtcgataggtatcgttgttgtcgaaagcgtcgttttagttcgtaggtttgcgttttggagaaaagtattcgtcgttttcgttttttgtcggcgtttttttcgtcgttcggggtttttttgttattgttcggtgattcgtcggtcgagggtttcggggatttggagtttgagttttgaggg

SEQ ID NO: 532 - DNA, 430 bp, Artificial Sequence
  Description of Artificial Sequence: Synthetic polynucleotide
aggcgtggggagtagagcggcgttgaggggagggtagaggaggagagagtttggtagcggaggagtagaggcgggcgtcgtatcgtttcgtacgttcgttcgttcgggagagtcgcgggcggtcgtttgggcgtatttgtcgggttattttgtttcggaggtaagtttagatttttcggtcgcgggggcgggcggaggggttcgtagtgggcggggtcgcggtaggggtcgcgagttggcggcgggagttggaggttgttttgcgttggcgggtgttttagttttggtttcgtttcggagcgcgtagattcggcggcggcgtggcgttcgcggtaagttcgggtggtcgtcgcgacgagatttgggagatacggggtcgtagggcgggagggggagttgagtcggtagagaaaatgtttaggaaggggtt

SEQ ID NO: 533 - DNA, 643 bp, Artificial Sequence
  Description of Artificial Sequence: Synthetic polynucleotide
tttgtttttttttttttcgtttagtttcgtttttcgtttgtcgggacgttagagtttttttttttttttcgttgttttttttttggcgcggattatttttcgggtagtaaagtagttgtttcggtttaacgcgtaaagtttagaaagttaggagtttttagatggttttggtgatttttcgggattatgtttcgtcgttttttagtttggagagaagttatttcgggattttttattttttcgttttttttttcggttttgttcgagtttaggaggcggcgttggcgtgcgttattttcgttttagttaaggttttttgttcgttcgcgtattcgttcgtcgttcgcggttcgcgcgttttttttttttttcgtttaagttaaataggttaaggttggggtcgcggtagggatagggttcggggtagtttgggattagggacgtgggatagggagttcgggtcggggtaagggcgggggttaggatcggttacgatttatagaaagaattcgggagaggaggggttgtcgttggtggagttcgtttttttgaagtcggagttggcgagtttttcgtatttgattttgtaggcgtttttttcgcgggttagtcgggatattttttgtttaagttgttttatttg

SEQ ID NO: 534 - DNA, 458 bp, Artificial Sequence
  Description of Artificial Sequence: Synthetic polynucleotide
tgaggttttttttggataacgtatttgaaacgtaattttaaggtaagaagttattttttaggcgcgtagtcgaagtttagtgttaaggaggtcggagattcgggtgttcgcgtatttcgaaaatagtttttgaggggttttttgagtatttttttagcgtgtttgggaggtaaattcgttgattagtttttgagaggagtggttagaggaatttaggcggggaaggggacggtggattttaggagagtgtaatttataaaggcggggggcggggacgtttaggttcgagttttaggattttgcgtcggacgtttcgttcgtttttttaggttttttgttcggttttcgtattcgcgcgggttcggagaatttttgagtatcggtttttagttttcgggcggggttttagcggcgttatttattcggttttttcgttatttgcggggttattttcgtat

SEQ ID NO: 535 - DNA, 452 bp, Artificial Sequence
  Description of Artificial Sequence: Synthetic polynucleotide
gggttgtttttgttcgtaggttcgggcgttttcgttaggaggcgatagcgttatgtttttttaggttttcggcgtttcgagatttttgggtagatggggacgtattttttagaaattgagtcgggtcgtttaggggcgagggaacgtgcgcgggtaaggttgtttaatttttagggttttttatgttttttttgcgtttcgacgtgcgagaatattgtttttggtagtgtagggcgtttttatttattatttttttcggttgggttcggttagtagggagggtcgttttgtgcgcgcgttttttttttattttttagggcggcgtagggtggcgggttttgtttttcgagcgtcgttcgttcggaggtttttgtttcgagggcgtggaagggagggtttcgggggcgggggaggtgcgtatttttcgcgtcgcgtattttattcgcgtttgt

SEQ ID NO: 536 - DNA, 440 bp, Artificial Sequence
  Description of Artificial Sequence: Synthetic polynucleotide
gtttcgtgtttcggggcgcgttttagtttcggtattattagtttttcgtttttttcggaggggcgttcgagtgcgttcgatacggttagtagcgtcgcggcgagtagtagtagcgtgggtattggtttaaagtttcgagatttcggagttcgtttcgcgttttttatgtcgttgtttagtttgcgtttttcgaatttttcgggtatagttcgttgtattggagttttaggagatatcgttcgtagtagcgtacggagcgagggatttttagttcgggtcgggagagtaaagtttcgttggtttgttttggattgttaaaattaataatttttattattcgttggaagggcgcgtagagtcggttatagtcgaagttttcggagttattaaaaggaggcgttgtagttttgtcggcgcgcgggaagttttttttttagcgt

SEQ ID NO: 537 - DNA, 439 bp, Artificial Sequence
  Description of Artificial Sequence: Synthetic polynucleotide
cgggacgttttttgtttcggtttcgagttcgagttcgattttcgttatttagttgggtgttttggggattttggttttttttttttagattcggatattgaagtaggcggtagcgggtgtttttttatttggttattttttcggcgtttagcgcgaggtagggtgggcgaggcgagggcggcgttttgcgagggagggcggtcgtagaatttgcgggtttttagcgttttttggcgaggtttttttttatcgtcggcgggatttttatgggtaatcgggggagttgggattgaaagtttggagagtttttttcgttgtgttgttggggagattgaggtttagtgagattttagggtttgttaggcgtttttaatagcgagggtagagagtatacggagagtcggttttttagggggaggaagtatttttttttttttcg

SEQ ID NO: 538 - DNA, 396 bp, Artificial Sequence
  Description of Artificial Sequence: Synthetic polynucleotide
tttgcggtgcgaggcgttttcggttcggcgcggcggcggagttcggttggcgggggaggggagggggttgcggagggggcggggtgggggtcggagtcgtttgagtcggcgggagcgggtatttttgcgcgtcgcgttcggtttcgttttcgcgtttttcgcgcgttcgtcgcggtttttttttcgcgttcgttcgttcgtcgggttttcgtcgtcgtttcggggtgtagtcgagcggtcgcgtcgggttttcgggacggggtggaagtgggggtggggggaggggatcggggtcgggtcggggtcgcgttgtttgcgatgtcgggcgttcgtcgtagtcgttgtcgtcggagttcgggatggggcgagaggttgcggcggacgttagtatttttt

SEQ ID NO: 539 - DNA, 418 bp, Artificial Sequence
  Description of Artificial Sequence: Synthetic polynucleotide
gatagttatataggttttggggtagggcgcgtttcgcgttttagggagttacgttagttcgttgcgttttcgtagtaatcgtcgtttgtacgtggcggggcgagagagttgttagggcggttttttcgtttcgggtttgttgggcggggtcggttaaggtgcgcgtgttcgttggttttaacggttttgttgggcgtttttgttgagaggcgggaggggttgagagtttgtgcgaaggtaggtggatagattgtattgtttgttgttgcgtttcggaggcggcgattttcgaaggcgagttgaaatacggttggagcgtttttaggttatagtttgtagtcgacgattgtggaagattaggagtcggagaggtggtttatttttagggagcgtttgtgttcggagggttttttatttt

SEQ ID NO: 540 - DNA, 363 bp, Artificial Sequence
  Description of Artificial Sequence: Synthetic polynucleotide
tatcgcggggttgcgacgacgcgggttcggagcgaaggcgcggagtagggaggatgcgttgttgttgggaattggtcggcgggagcgcggttttagttttcgttagtagttacgcgcgtttgggggcggcgcgttgcgagcggttgagatcgcgggcgggggcgggcgtttggtttgggtagcgtttttagcgcggtgtgggcggcgagtttcgtagggttgtaatcgtttcggggtgggggtcgggataggtatcgcgggcgtaatttgagtttttgtttacgcgtagcggttttttagtttcgtcggtttaggtaatttaggtcgttgcggtaacgtagtgatcgcgttttaggttcgcgt

SEQ ID NO: 541 - DNA, 371 bp, Artificial Sequence
  Description of Artificial Sequence: Synthetic polynucleotide
gcgggaagaaggtacgaggcgtcgtcgtagttcggttaggggtcggggtttcgtcgttcgtcgttgtattaatttgtcgtttggtttcgtttcgtcgtcgcggttcgttgcgttttgggtggcggggggcggggagagcggggagttagagggtttgcggtggtcgagggagggattttacgacggggagttcgttcggtgtcgttttttttttttttttcgttttttcgttttttttatttcgtttttttcgtcgatttcgggagcgacgggcgttcgtgatttgcgaacgttgttaagtgacggttttcgagtttgaagcgttcgcgaggaagcgagcgttagcgcgggtcgtcggcgatgacggtcgt

SEQ ID NO: 542 - DNA, 397 bp, Artificial Sequence
  Description of Artificial Sequence: Synthetic polynucleotide
taggtttcggaaggagttgcgcgagaaggggtcgtcgcgggtgttggagtcgttgaaggacgtggtgttgatcgaaggtagcgcggttaagtttatttgtcgtatttcggttttttcggatttatttattcgttggagtaaggacggtaaggagttacgtgacggttttaagtatcgttacgttttcgaggattttgacgtggtggtattggtggtgcgcgacggcgagttggtagatttgggttagtatagtattaacgttattaattttttcggttagtgtttcgattcggcgcgtattttcgtggaaggtacgcgcgtttcgggcgtagcgttagggcgtagattagtattatttagttagagttcgtagttcggtttagttgcgcgtgtttat

SEQ ID NO: 543 - DNA, 366 bp, Artificial Sequence
  Description of Artificial Sequence: Synthetic polynucleotide
tcgagcgggcgttcggtgttttttagcgttcgtcgttttttttgtcgtcgcgtcgagttcgtcgcgtcgttcgtttgtcggttcgagggagggggcgcgtcggcggttttattttttttcgttcgtttcgcgcgtttttttttttttttgtatttttcgggttatttggtagtggggcggtagcgcggacgtgggtcggcggtcgcggagataggttttcgggggtcgtgcgcgggttgcggtcggggatttcgggtttagtcgcgtttcgagacgagtgagggtagcgagtattttcgtgaagggtttttttcgatttagtgtttttatttttagtcgtttattagtcggttggaaaggggttgg

SEQ ID NO: 544 - DNA, 907 bp, Artificial Sequence
  Description of Artificial Sequence: Synthetic polynucleotide
cgcggggtattagtttagtttttttttggggatttcgtattcgtagtttaaggaatcggtggagtacgaattttatttttgagttggcgtaagcgttttttttttatggagatttatttcggtttttttttgaggttttttttttaagtattttttttttcgagtatttagtatttttttaattttagtacggttcggggtattagttttttagggcgggggttgttttatcgtttaagggaggggatagagggtcggtttcggtttaggcgatttttgtttttcgttaggggcgttattttggttttttttcgattgtcgttcgtcgttttcgttttttcggggggtgtgttttcgaagtacgggggcgcgggaggttaagggtgtttttagttttcgatcgagattttttttcgagtcggcggcgaatggtaggttttatttaaagagtgtttggtggcgcgcggtgttttttttggagtagttttcggcgttcgttcgtcggggtttcggcgatcgttgttttttttttttttttttttttttttttttttttttcgtttttttttttcgtcgtttcgttatcgtcgcggttagggttggaggcgtcgttgttatttttgtgtcggaggaatcggcgttgtcggtgtttgggggtcggggcgcgggcgaagtcgggtcgcggaggatataataggtagagtcgggggtgttcggtcgcgcgtttttcgcgtattatgtagttttttgttatttttttcgtttttaggttaaaattttgagtatgatggaagataataagtagttcgcgtttcgtatcgatggggcggtttagtcggttagttaggaggtgattaatttgcgagtcgaatttacggttattaatcggagattggcggaattgagt

SEQ ID NO: 545 - DNA, 562 bp, Artificial Sequence
  Description of Artificial Sequence: Synthetic polynucleotide
gtttttttagaaagtgcgatttttttttaggaaagaagtagggttatttttgttttaaaagtatttattttgtacgttttttttagtgtttggtacgtggcgaataaattaattaggatgaaaggagttaatttaagtgcggagtgttgaattttagaggaagaaattcgcgtttattaggtttaggtttgggttaggcgttgttttggcggcgttagggaggatatcgtgtttagagttcggatttagtagttcggtttcgcgttttttttgtttcgcggttcgtaggtttagtttttaagcgtttagttttcgcggtttttgtggcgttatagttagtttgaagaatggttgttttggagacgtaaatttaagagttttgtttttggagttgagaattgtagcgcggaggtttcggagcgagtcggggtagtcggggtcggtgggtgcgttcgcggttcggggagagggggcgcgcggggttcgtgagggcgcgtgggggcggcggtaggggtgcgaaattagggttcgaggggcgcgcgtggtcgggagcggatttgta

SEQ ID NO: 546 - DNA, 563 bp, Artificial Sequence
  Description of Artificial Sequence: Synthetic polynucleotide
gagttgtaggaggaagaggaagaggagtaattcgagggttgttcggaggaggaggagaatcgtgcggtagagggagatttagtagaggaggaggtcgaggcgtagcgtgcgttagtggtcgttatgtattttgagtgcggggatttgttggatattttggagaatggtcgtggggaggcgttaggaggcggcgggggttttttgggttcgggggtcgggtcgtcgtttttgttgttgggtagcgttttcgatatgaaggttgagttgtcgtaatttattagcgatttgggcgagtttagtttcggtaacgacgtgcgtattttgtaggtcgatttgcgggtgacgcgtttgttgttaggcgatagtacgggtagcgagagttttatcgagggcgggggttttgacgttattttcgttatcgtcggggattcgtttcgttaggtcgacggcgttagtgtagacgagttttattcgggttgagttttttcgcgcgtcgtcggcgttttatcgtggttatttattcgtggtttcgataatttttttgttttttgttcgtttttagg

SEQ ID NO: 547 - DNA, 509 bp, Artificial Sequence
  Description of Artificial Sequence: Synthetic polynucleotide
gtcggaggcggatgtgggatggtgttaataaagcgcgtagtcgaggtttggttatagtgggtgttgataaatcgtttattgtttgtagggatcgagttttcggtcgagggaggagggtcgagtagggatttagattttttcgggtcgattttttttttagtttttttcgttttgtcgtcgtttattgcgtgttgttttcgttcgtttttttttttttcgttttttttttttttttttttgttttcgcgtcgtttcgcgtttttcgttcgttgtagtcggcgaggagcgtcgtacgttggtttcggcgcgaggagttttcgggttttcgggcgggtattggagtaaggagttgcgagcgtagttcgaggcggggtacggcggaaggcgcggcgagagcggggtttttgcgagcgtagtcggaagggcgtttaggagaagggggacgtcgttttcgtttttgtacggtgttcggttttttcgggtttcgcgcgcggttataattcggattg

SEQ ID NO: 548 - DNA, 442 bp, Artificial Sequence
  Description of Artificial Sequence: Synthetic polynucleotide
gttttttttttttagggtgtttggatatgttgagtttttagggttagtttatttttatcgtcgatcggtcgtagttgtattgcgtagttttttttattagcgagttcgaggagtttattattatttattacgattaggtttttatcgattgttagggcggcgattttttgaaggtgaggcgtttacggttagttaatttagtcggagggcggtacgggagggttggaaagggttggggcgttgtatttagcgtggggttgttgagcgtaggtagttagtggtattttttagatatttcgttggtgttcgagtcggagaggcgcgttcgaggatttttatacggcgagaatttcgtttttattcgaagatttcgatttatatatatttagtggggttggggtcggtgtttttggacgttgttatggtttaaatttttttttgg

SEQ ID NO: 549 - DNA, 441 bp, Artificial Sequence
  Description of Artificial Sequence: Synthetic polynucleotide
tagaaattgggatttttcggttttttttgtagttttttttttttcgtttcgaagttcgggcggtttgttggttgtttgttttttcgttttcggtttagaggtttttggttggcgggcgtttcgtcggtcgtcggttttttttttgaaattcgtcggcgtatatgaggtcgttgttttcgtcgtaggcgttggcggttttttcgcggtgttcgtggtgatgttatgtttcgttattacgcgggaggagaggagggcggcgtcgtcgggttttgggtgaagagcggcgtagcggcggcggcggcgggcggggggcgtttgggtagcggtatgaaggatgtggagttcggtcggggtagggtgttgttgaattcggtagtcgttaggggcgacggtttgttattgttgggtattcgcgcggttacgttcggtggcggcggcggt

SEQ ID NO: 550 - DNA, 410 bp, Artificial Sequence
  Description of Artificial Sequence: Synthetic polynucleotide
cgttttgtttatagtaggatttttttgtcgaattgcgaaggtttgcgttgcgtggggattcggtgaattttttttgtagcgaaagtaatttagatggacgcgggaattgacgtatcggtatagaggattagcgcgtttttaagtcgattttcgggtcggtttttcgttgttttttcgtaatttttttttttttaggattttttcgtcggagttttggtttatcgtgattttggggtttagaattgttgggggtttcgtcgttggagtagtaggggagatttcggggcggaagagtcggtgcgggtcgtcgcgtggtttcgagaggcgtttcggggtcgtagcggattgttagttcgcggttaaggcgtagtaggttttcgatcgttttgagtatgttgttcgtttgtttt

SEQ ID NO: 551 - DNA, 424 bp, Artificial Sequence
  Description of Artificial Sequence: Synthetic polynucleotide
gttttcgggcggggcggggcggaggatagtacgaggtttaggatttttacgttatttttgtagtttcgcgtttttttttttagttttggtcgggttttcgcgttttttcgattttcgatcgtaaagtcggggtgcgagagggaaagggaagtgaggcggtacgcgtatggagggtgtgagtgcggatatatatatagggtggttaggtacgaaaaatttcgttttttttcgaattttcgtttcggattagttgtagttttattattttagggttttttgcgtcgggataaagttgtcgcggtttttttgcgttcgcggagcgcgtcgtcgttcgatttttttagtttttttcggtcgtaatttcgttttaaaggattcgtgggtcgttttagggacggaggggattcggagtcgggcgttcgta

SEQ ID NO: 552 - DNA, 581 bp, Artificial Sequence
  Description of Artificial Sequence: Synthetic polynucleotide
agattcggcggaaaggagtcgcggaggggaattgagtgtttttagtcgggtatgttcggcgagatcgcgatgttcggtgagatggtaatgttcggggagatcgcgattttcggggagatcgcgatgttcggggagatcgcgttgttcggagagagggcgatgttcggagaggtcgcgatgttcggggagattacgatgttcggggagatagtatcggtttttttagaaattttttggtttgaggggtaagtagtagtcgtaggaagcggattcggcggaaaggagttatcgaggggaattgagtgtttttagttgggtatgtttggggagattacgatgttcggggagatcgcgatgttcggggagatagcgatgttcgggggtatcgcgatgttcggggagatcgcgacgttcggagggatcgcgacgttcggggagatcgcgatgttcgtttagggagatcgcgtcggtttttttagaagtttttttttttttgaaattcgttgtagtttataattttttaggtttggttttcgttttgtttaggttatattttcgaatttatcgatttattttgttcg

SEQ ID NO: 553 - DNA, 656 bp, Artificial Sequence
  Description of Artificial Sequence: Synthetic polynucleotide
gttttttttagttgttcggcgagagaatttgattttgaacgtagcgcgggttgtacgtagaattttcgggttgggtcgcgcgtttcgggttttttgcgcgtattttcgggtcgcgcgtttcgcggttttcgtagttttttaggttttttttttttttttttttttttttttttttttgtcgggcgcggcggttatttcgacgggcggcgcgggcgcgggtatttgtagaatgtcggcgggtcggtttcgcgtatcgtgtagtcgttgggttcgttttttaggtagtagggtatttgttggtcgtggggttgtaggaaaggcgatagttgcggcggcgggtgtagtagtattagcgggttcggagatacgttgttgagtggggggaaattttttaggtcgttggagtcgaacgtcgtagttttagattcggggtcgtaggggaggtcggtttgatcgtagatttgcgcgttggcggcggtcgcggcgttgaattcgtaggcggcgttttcggggtagttgtatacggcgggtttgttgttgtttaggtatatttcgtttaggggtcgttttagggggattttgagttgcggacggtttaggggttttagttcgtttttttggatttgatgtagtagggttattttagatgttttggt

SEQ ID NO: 554 - DNA, 651 bp, Artificial Sequence
  Description of Artificial Sequence: Synthetic polynucleotide
tttatttcgtagaagagaaatttttttttaacgttttgttgttttacgggggattttcggggtgggtattacgtggttcgatacgtagtcgtggggttttagagcgcgtgcgcgcgtcgagttcggtcgttacgtttttttcgagggtcgtttcgttttcgtcgggtttcgcgagcgcgcggtgggggaggggagggtttcggagcgcgtttgcgtggggcgggggcggtagtcgattaggggttgggtttggtcgtttagggtcgggttttggttcgtcgtttacggtgcggagggttggtgggttttttttggtcgtcgggttcgttacggcgcgggttttggttgcggggcggaggtggggcgggagagtcgaggataagagtttgaggtttttcgaggcgcgtgtcgcggcgttcgtttttgcgggattttgcgtcgggcgttttcggtcggcgcgttcggttttcgttttgtcgtcgagggaagtacgcgcgacgtttttttcgtcgtcgtcgtggtttttttcggtgttcgtgatttgttgagaggttggaaagtagtacggcggagaggagttttgtattcgttaggcgggaagtttgcgcggatacgcgtgcgtatttacggggcggcgggcgggcgtggggg

SEQ ID NO: 555 - DNA, 564 bp, Artificial Sequence
  Description of Artificial Sequence: Synthetic polynucleotide
tttaaattaacgagttttatattgatttttatttagtattgaatagttgtattaattttttaattacgaaatttcgttttagtttttacgggaggggagagttttcgaacgcggggcggtgggggttcgcgtagagtaggttcgggaggtcgagcggaggagcggggttcgcgtcgggtatacgcgttttttaggtcggcggcgcggcgtgggtttgttttcgggagggttcggcgaggattatcgagttcgcgtagttttcgtcgatttttcggaaatgtgatcgtcgaagttagaggggtcgtagggtttatttcgtagtttttcgtaacgcgttaatttggacgttagcggcgcggggtttcggtcgggtagggggcgttcggtatcggcgggtttatttcggttcgttcgttcgtcgtaagttcggttcggtattttttttgtgcgtttttttggttttttagttttttcggcgttcggtttcgttcggtcgtgattttttcgttttttttattattttaagcggggaaaggggtcgtttcggcgggggtcgggtcgggg

SEQ ID NO: 556 - DNA, 495 bp, Artificial Sequence
  Description of Artificial Sequence: Synthetic polynucleotide
cgtgttaaggaagtggcgttaatttgaggttttgggattagatttatcggatttacgtcggttttgttacgtgttgttcgtagttttcgttcgtttttttcgcgttggtaacgggtattgattgttcgatattttagcgatcgtagagatttttttaatgtcgggcgtattatcggcgggttagcggtttcgttggtttttttgatatattttttatagttattttttttagttgagatttttttttttaatatttcgttaattaacgtgtaattttttggttaaaatgttagagttaagattaaatttgaagaaaagaatgaaattataggaagttttttagatttagtcgttagtaaggttatggttcgaagcggtgtaggggcggcgcgtcgggaagttattggtagagttgtgcgtattggggggtgttgtaagcgttggggagagtgtggagaggttgcgtggagttgcgcgttcggggtgggagttgta

SEQ ID NO: 557 - DNA, 710 bp, Artificial Sequence
  Description of Artificial Sequence: Synthetic polynucleotide
gaggcggtggtagcgcgtttttgtttcgcgtttcgtgcggggtttttgttgtcgatagttgttgttttgatagaggcggcggcggcgatagtatagagtacggaggggattcggcgagttagtttatatgttgttttgacgaggtggttgtttaatcgcgggttagcgatatatttatttaaggataatttttagggtttattagggaattaggaattttttcgttttttttttttcgttttttgttttcgcgtttggcgtttgttcgggggatgtttaggcgcgggtatttatcgttcggtcgggggcgttttgggttgttggttgtagtgtgaagatttagtagtagtcgtcgttatcgtcgttgttttgtggggagagtggcggggagtttttgggagcgttaaagcgttgttttcgttgtagtcgggagagggcggaggaggagacgggcgggtcggggtgaggatagggagttggggacgcggcgatttgtgtttgaggagggtagttagcgtttttgttgggagttgtgggttcggggttgtttaggaggtttaggtgtgttgtggggcgaggttaggaggtgatagttgtcgttgtagtcgcggggggttttcggggttgtaggattcgttttttttatttttcggttttagtcgtttagtttttcggtttttttgttttatttttgagttaattttttattg

SEQ ID NO: 558 - DNA, 586 bp, Artificial Sequence
  Description of Artificial Sequence: Synthetic polynucleotide
tattgttcgtaggagtacggaggtgtattttcgtatgtaaatttttaaggtttttcgagtttttgtttattttggggatttagtttaggttttttagtatagggtcggatcgggtgtcgcgaagtagtcgtcgttttttatttgaatttcgtcgttcgggtggtttcgcgaaaatttatttagtacggttagtttgttgtcggtttcgaaagttaggacgttggttttagagtatagttcggggatttttcgtaaaaattagatttaagtcgttcgcgttcgcgttttagtagttcgcgtttatcgagtattaggagtcgcgtgtttggttcgaagtattgggttttttggttacggttttcgagtttcgtataaaaattcgagcgtagtttcgttttcggtttttcggcggttttagtttatttagtattgagagtcgggtttcggcgtcgaagtattgaatgtttttggtttatagtttcgagacgcggtatagaaattggttttgcgacgttttcggcgtttcggggcgttttttttttagtttcggggttttagcgggagttttcgtttatcgagtattgtt

SEQ ID NO: 559 - DNA, 466 bp, Artificial Sequence
  Description of Artificial Sequence: Synthetic polynucleotide
tcgtcgggcgtttcgggagggtttaggtcgatttcggggtttattagaggcgttttaggtcgagggagttcgcggcggttggaaggtgaatttgatatttcggttttatcgatttcgtagcggttcgtattttatttttatttcggttagattaaagtagaattttgggtgtgcgcgtgattttttagggagggcggattcggggttttttttgtcgtattttttattgggggatcgtttttaagttttcgagagtttttcgggtagagtttttagggtttagagtatgggaggatttggtttgtttggtggaggcgagtagtcgaggggtcggtggagttgcgttttaaatgagttttcggcgcgcgatttttttcgatttcgattttttgttcgtttttttttttttcgtttcggtttttggtttaggggatttaggcggcggcggcggaggtggtagaggtta

SEQ ID NO: 560 - DNA, 587 bp, Artificial Sequence
  Description of Artificial Sequence: Synthetic polynucleotide
gtgggtgggcggtagttttcgagtcggggatttcggttggtttttgtgcggcgtgacggggtggttggttgagttttaggtttttttcgtttgtcgtaggttgggttggcgttgcggatttaagtgtagttttttttcgcggggtacgggcgtaggcggcgtttttagggaggcgtgcgcgggagcgtcggggatgggggacgggcggggttggagcggggatttatttttttttttgttttaagaggatttaaaggaaaataatttatttgattttggatacgtttttatttataattcggaaatatgtaaatgaaaggtttatatggtttgaaaggggtaaattaagtttttagcgtgcggcgcggggaatcggtttttttttagggagtttcggaggcgcgcgttttacgtcgagggcgttcggggaggaatcgtatttcgggttcgggagtagcgcgttcgggtttttagcggttatcgttcgggggttttttaagttcggtttttgttttttgtcgttcgttttttaggtcgagttttcgttttcgcgatgtcgtcgcgttcgtcgtcgttaggcgcgttgg

SEQ ID NO: 561 - DNA, 459 bp, Artificial Sequence
  Description of Artificial Sequence: Synthetic polynucleotide
ttttcgttttagttgggtatcggtttggaagcggtttggaattagattggattcgaggaggtaagatttcggtagcgcgaggttaattataggttttattcgcggtttttagttcggttttatcgtagtcggcggtagatattttaaattttttatacgtcgtttttagcgaggcgtttcggggaaagtagcgtgaggtagtgagtcgaggggcggggttaggaggacgtttcgttttcgagttcgtttcgtcggagggtttgattaatgattttttaagtcgttttagttttcggcgtagttttttcggtgggttaggtttttcgttcgatttgttttagtcggtcggagtatatacgtttggtcgcggggcgttcgtataaaagttatagttagcggaggttggaaatagtcgtcgatttgggtatcggtcggacgaggatggagtgattagcgcgg

SEQ ID NO: 562 - DNA, 524 bp, Artificial Sequence
  Description of Artificial Sequence: Synthetic polynucleotide
ttaaagtttgcgttagaagaggttggggattgcgagaggagaggttggggtttgtaggggagcgtagtagtttttagtatcgatttaaattttaaagattcgtggtttttgtttgatttcgagggtcgggaatagacgtttgtttttgtggagagcgatatttaatcgagaaaatggggttgtttcgagttgggttttgcgtttggtttagggcgaggtttttttggtttcgggttggtttttgaggggcgtaaacggtaggtttggcggttggggtcgaggagggagggtattatcgtttcgaggtagtacgtagtttgtagtagaggcgtttgttttaagttgttttttgggggcgtcgtcgtcgtttttttttttcggggtcgttcgtttttaggaaagtggaggcggttggcgaggatcgagagtcggggtcgcgttgcggagggattatattttcgggagttcgagggggattttggcgcggcgggttagtttttgtttttcggttacgggtcggtagt

SEQ ID NO: 563 - DNA, 530 bp, Artificial Sequence
  Description of Artificial Sequence: Synthetic polynucleotide
attcgtcgagggcgaagaagttgggagtgattttaggggtttttgcggttagattaaatcgtaattttcggtgtttttattttcgcggatcgcggggtaacgttagcgagtagcgtttttttgaggaagggaagagggggaaagggtgatcggacgagcgtatttgttttagcggattttcggtgtatatttggggattgggggttttttaggtggcgtttttttattttttgcgggtttttttcgtagttttaaatattttaaacggcgcgcgtatttttcgtttggtttatttatcgatttcgtcgatacgtaggttattaagtttaaggtgagtaggatttacgcgcgtcgtatattttttagggatcggttgtttttagtcgttgtttgtaattagggtaaaacgaagttttttgtttagcgttcggcgtagttcgcgtatacgaattcggagtagagtatcgtagcgattgcggtttaggttcggggattcgggttcggggttcgggggcgttcgtttttttttt

SEQ ID NO: 564 - DNA, 465 bp, Artificial Sequence
  Description of Artificial Sequence: Synthetic polynucleotide
tttttcgggttagttttttgttttttagatcgaggcgtaataagtttgaaagtagcgttaaggagtagttagcgagtcgaagggagggcgtggggcgtcgggcgtttcgggattttcgaacgcgcgtaacgttcgttttcggggatcgggcgcgggcggtaggcgagcgggattgattcggcgggttgcgtatatttttttttaaggtttcgattgtgcgcggacgggggcgcgtttaggaattttcgttttttttttcgtttgtttgattttgttgggtatttaaagtcggattcggcggtatttcggcgtgcgggcgtagagtttcgttgtcgtttacgggagggagcggttcgatttttttcgttgttttttcggtagtcggggtcgtagacgagtggaaggtatgagggttttaggagacgtgatagtcgtttttttagattttatatatcgtatattatt

SEQ ID NO: 565 - DNA, 454 bp, Artificial Sequence
  Description of Artificial Sequence: Synthetic polynucleotide
gcgtaggtcgttgaatagggtcgataaggttagtagtaggagcgtttcgagcgttcgtagttacgtagggggtagtaggttttcgtttgggtcgtataatcgcgggcgaacgcgtagtaggaagtcgtcggcggcgtcgtggtggtgttacgcgcgtttattttaggcgtagagtgaaaagagtttttcgttatcgttcgcgtcgtttcgtttcgtttcgtttttgcgtagttttcgtattcgtatttggattagggtcgagtttgttacgttttcgggacgtaagggttttaggatttttacgttcgatgtttagtcgttttgttttttgtagcgttgcggtttcggggggcgagtggggatcgcgttgggggttacgtcgttatcgttcgggggtttttcgatgaatacgagtcgcggagtttagtcgtcggtgttattttttttcgagttg

SEQ ID NO: 566 - DNA, 380 bp, Artificial Sequence
  Description of Artificial Sequence: Synthetic polynucleotide
ggtcggttcgcgtttagttagtagttcgttcgcgttcgcggtgttgcggttttttatggcgcgttcgggcgggcgttgagtatcgcggataacgtcgggtcgtaagtcggggagttttttttttcgggtacgtttcggtcggattttggtttcgttttcgattcgtttcggtttaggggggttttcgcggcgttttatcgtgagtttagtatttgtttattttggaattttgcgtagggagagacgggtacgtggacgaatgcggcggtttaaagagacgggaatgaagcgaggtggtggttacgggtaggttagtatcgttcggcgtcgcgcggggttcgcgattcgagaaatcgataaggatggaggggcggttagat

SEQ ID NO: 567 - DNA, 357 bp, Artificial Sequence
  Description of Artificial Sequence: Synthetic polynucleotide
cgtcgttcgttttattttcgtatatttattttggtttttgggtttgtataagtataaacggtttttttttatttttaacgagggttggggaattaacgagtaggattagtttattaataagtaaagagatcgttaggagggatatttattttttgagggcgtcggtagggggagcggggttgagtcgttcgtttcgtatcgcgtcgtttcgtttagttcgtagtttatagtttttcgagtcgttgtttcgtaagatttttattttcgtttttatttttgtcgttcggtttagaagtgtggtgggattttgggggtagtagggggcgaggggggcgacggtgggttcgggggtgttcg

SEQ ID NO: 568 - DNA, 421 bp, Artificial Sequence
  Description of Artificial Sequence: Synthetic polynucleotide
agtttttttttcggagcgtagcgaggaagggacgcgaggggacgcggcgtagcgcgtcgtcgttcggagtttaatttttcggagcgcgcgtttttcgggtcgttagtcgtcggcgaggttattcgggaggggcgggagtcgtttgttagttattcggtagtttttttggggtttttttcgcgcgttcgtttgtttttttttcgttgcgttttttcgtttgttggcgtttttgttttagcgggattcggtagttaggggttttagggggcggtgtagtaaatttttagcggtttgcgtttagtagattaggttggggagtcggtttggcgttgtagggaggtagagagcgggaggaagaggtagtggtaggagggaaagggagagagagatagagagagagagagagagaggaagcgagata

SEQ ID NO: 569 - DNA, 435 bp, Artificial Sequence
  Description of Artificial Sequence: Synthetic polynucleotide
cgggtgatggagtcgatacggagttatgtagtttggagaagtagggatgggtaaatataggttgatagtgggaagggttttgtttagtacgattaggttcgtttttggattttatttatgaaaaggattttttgttgttttttattcgtatttataaattataggttttagttcgagttgatttcggtatttacgttgaagggatttttgggaaaataatattcgattttgtttttgtagttattgtttttttttttcgatttgtagtgttaaatttgtgttatttttcgtttttatatatttttcgtaaggtttggttttttgcgagtttggaatataataggtggtgcggtttttgagggttcgggtagttattcgtattttttcgttacgcggagaaagtcgagtatataggtcgtagggtgggggttcgcg

SEQ ID NO: 570 - DNA, 492 bp, Artificial Sequence
  Description of Artificial Sequence: Synthetic polynucleotide
cggtttgggggaataggtagggaaaagggttttttgggttatttattttttttagttttattattgatttttggagaatatttagatggtgttaggtagtattatgtttattattatttttattgagataaaagttagcggttggtaattggtgtttattttttcgtttgagtgggttggagaaagacggtatggttggaggaatttgttttgttttgttttggagcgggtttttttagttgtattttgtatcgggcgggtatagtttcgggttttgggaagacgtcgttcggtagtcgtagtggtcgttgtattaatgggttttggggtagggaggtgcggagtttagtttgcgtttttggttattttttcgcgtttcgtcgtcgtttatagtttattttttttttttgtagtcggtaggcggtcgtaatacgggcgggtcgagtacgtgggcgttttcgttatatttttatatatatatatacgcgcgcg

SEQ ID NO: 571 - DNA, 450 bp, Artificial Sequence
  Description of Artificial Sequence: Synthetic polynucleotide
ggggaggacgcgtcgtcgtcgtcgtcgttgtcgttagggtaggcgcgcgtcgcgtggagtcgggcgggtgcgagggcgcgcggcggggggtggggggtacgcgtcgcgcggggggcgggggtagtggggggcgcgcgcgcgggttcggggagttcgcggggagagttcggcgttcggcgtagcgcggcgcggttaagtttcgcgtttttttcgttttttttcggcgcgttcgttttcgtttcgtcgttcgtattcgttgggggcgtttagaaagatgtatagaggtaacggttaggggagcggaggtttaagttatatgtttgcgttttcgggggttagagttcgttagttttcgcggatttcggttcgcggttagttcgagcggttcgggtgagtagcggtatagcggttttttcgtttcgcggttttcgttcgtcgagacgtggtttt

SEQ ID NO: 572 - DNA, 448 bp, Artificial Sequence
  Description of Artificial Sequence: Synthetic polynucleotide
tcgagatttttcgtttggggggcgttttttttggttttcggagtttttttttttttcggggttttcgttttgtcggggggatgtcgggtgcgttggggtgcgtcgggaagtacggggatgcgcggcgttgtaggcgcggtttagggtttttcgggggtcgcgtcgcggagggggcgaagttaggagttggatcgtttttgtttttcgttttgggggtaatagtttcgtttttttagtttagacgttttcgagtcgttcgcgggtttttagcgggagtcgggggtggggtttttaagtattcgcgtttttatcgttttttttcgttttcggtttcggtttcggttcgcgttttagtatcgtcgttttttgggtttttttcggagtgggagggagtcgcggtttcgttttcgcgttcgtttttttttaggtttttcggtcgtcgcgtcga

SEQ ID NO: 573 - DNA, 393 bp, Artificial Sequence
  Description of Artificial Sequence: Synthetic polynucleotide
ttcgtgcggttagcgcgtcgcgtcggcggattttgtagtttagagagtttagggagtttagggaggggagcggggcgcgggcggggtagtgtcgtataatcgtaggcgcgtttcgcgtcgttttcgtttcgggtttattttttttcgtcgcgttttttttagtttatttacggacgagcggattttcgattttcgcggtagggatattttaagagttttgtttaggtttgcgtcgtttagtatttcgttcgtgtcgggggttcggcggtttcgggcgagagacggaggttacgcgtagggttgggcgtaggggtcgtcgttcgaggattatgggtgggttagcgtttcgtcgggttgttagttggcggggatcgtcggcgtttgtgtcgggtt

SEQ ID NO: 574 - DNA, 367 bp, Artificial Sequence
  Description of Artificial Sequence: Synthetic polynucleotide
tcgggaggagaaattgaggtttagagagttttcgcgatgttagttacgttttgtaggtcgggttttttttaggttattatagcggttggcggagggagcgcgcgttttgttggtttggagggggcgggggtcgtggcggttttaaagcgtttagtttaggcgtcgcggggtggggcggttttggcggttgcggggcgtagggcgtagcggttaagcggggttttcggaagtatagttggggtgtttttatttacgattggtcgcgcgttttttttttttcgcgttagggaaggagcggttgcggttttcgtcgggcggaggtacggggggcgtacgaggggcggaggggatcgcgtcgcggaggaga

SEQ ID NO: 575 - DNA, 519 bp, Artificial Sequence
  Description of Artificial Sequence: Synthetic polynucleotide
gttttggttggttcggggttggtttttgcggttgttcgggttgttggaggagggagaggtggcggtttggtcggcgcgtatttgttgtttttatttttagcggattcgcgttggggtggtcgtcggcggtagcggtttttcgggtttatttttaggtttaattagaaattcgggagtagttgagagagtttcggagtttcgtgtattgtgcgttgttttgatttgttaaaaaagaaagtagaaaaatatttaaagtacgttcgagaagagaagggggaaatttggggtttgttttttttttagaaaagtcgaggtttagggtgagagtttttttgagcggtttttggttgagttagcggagcggggaggttttcggcgtttttgcgatgagattttatttttacgtcggttgcgtttcgggattttcgcgaggattcgttcggcgggcgcgcgagcgagcggggttttttcgggttttaagcggtttcggggtcggcgtttcgtgattttgtcggattt

SEQ ID NO: 576 - DNA, 459 bp, Artificial Sequence
  Description of Artificial Sequence: Synthetic polynucleotide
ggggtcgcggttcggagtaggttggggttcgtcgggatcgcggttagagcgcgttaagtgcgtaggacgcggggttggggttttggcgtgcgtttttcgtcgcgtattagtgtttatttttttacgtatcgttcgggatggtcgtttttagacggtttcggttcgcggttattttcgttattttcgcgtaggttttacgtcgttttagttgtttttcgaggtttttaagaaaatttgggcgtcgtttttcgatcgtagttttagttagagtttttcgagcgcggggtagtcgcgggtcgtttttattcggtcgcgattcgggattcgcgggtggtatttattttttcgaggcgtcggcggtagcgggaggcgagtttttcgcggttttcgttcgagtgcgcggggtacggaggagcgcgcgtttttaagattttttttcgagatttcgttaggtggtgt

SEQ ID NO: 577 - DNA, 384 bp, Artificial Sequence
  Description of Artificial Sequence: Synthetic polynucleotide
gttgacggagacgttatatcgcgttaggggagtaggagttttttcggagcgggaggcggggcgtcgtgtggttgcgagcgcgttttttggatgtttcggtcggcgcgggggtgggtgggcgttttcgttttatttttggtttcgggcggttagtcgcggtgtgttcggagggttttgcgagggttgtgggtggcgggcgagttttagcggcgtagtagaggaggggttttcgagcgagcgtattagggagaagggggttcgtgtaaattttaggttgacgatcgcgtacgcgtttttcgggttattagttttgtcgtttttggtggggtatatcgaggagatcgtcgtggggaatcggggatcggattgtttgatagtcgagcg

SEQ ID NO: 578 - DNA, 545 bp, Artificial Sequence
  Description of Artificial Sequence: Synthetic polynucleotide
gggtattcgtttagcggttttttacgggagttggggtagaagacgtcgcgatttcgcgcgggtaatttttttcgaggcgcgttttagttcgtggcgttgtcggcgtagatttcgcgtggggatcggcgaggttaattttttttgcggttcggggtcggtagagtacgtaaggggtcgcgggtcgcgtgggtttgggcgcgtcgtggtgggtaagcggggttagcggagcgggaattcgtatatttttcgagcggagtcgaggataggttcgtgcgggtcgcggggtttttttggcgttaggaagcggcggtcgaaggagataacgagaacgtagtttcggtttagggaggtttaaaagttgagatgttgaacgtagacggcgggcgttcgggggttggggggcgggtagaggtcgttattttttaaaaaggtttttatcgagtcggtttttgttttcgttcgaggggcggacgttcgatttcggtattcgggattgttcgtgggtttttgttggttggggatttttagttttcggttgcgcgtag

SEQ ID NO: 579 - DNA, 291 bp, Artificial Sequence
  Description of Artificial Sequence: Synthetic polynucleotide
aacgattcggtagtcgaggtagcgtcgcgttttacgttcgttatcgtcgtcgtcgttttagtatatcgtaggcgtgagtttcgtcgcgatcgggagagtttttttagttgtgcgttttcgaggtatttggtcgggcggggaggcgtcgggtcggggcgtataggggttaggcgggggcgttgttgtttatttttcgtttttcgggcgtgcgtttcgtttcggagttcgtatttcgcgttcgcgtttcgtttggaagttttggggtatcggacgcgtttttttatttttttt

SEQ ID NO: 580 - DNA, 492 bp, Artificial Sequence
  Description of Artificial Sequence: Synthetic polynucleotide
tgggttagtttcgtaattttcgtttgttttttgttttttttttttttttcgagtcgcggggttttcggggcgcgcggattttcgttaggggtcgtgtaggcgcggagttttagtcggtttgttttgggttcgaagaaagttgtggtttggagttagttttttttttacgatttttgggggcgtttttttttttttttgagttcgcgatgggaaggcgtttttattttattttcggggtttttgagattttttggcgaggtggggcggcgcggtaggtgtagggttggggagggtttgatagttttggagagtgttcgattttagttcgtcgtcgttttttaggcggattttttagaggtaggttttagttttcggcgcggggaggcggcgcgttttagaggggcgtagggtgcgcgggggtcgttggtttttcgggtattttttttttgcggttttttcgttttttttcggagttggtgtttgaggtcgttg

SEQ ID NO: 581 - DNA, 381 bp, Artificial Sequence
  Description of Artificial Sequence: Synthetic polynucleotide
tttttaggatttaagttttaagttttcggagttttcggtcgacgagttatcggataatgataaggagatttcgggcggcgggggggacgtcggtaagaagcgaaagcggcgagtgtttttttttaaggcgtagatttacgagttggagcggcgttttcggtagtagcggtatttgtcggcgttcgagcgcgaatatttggttagttttattcgttttacgtttacgtaggttaagatttggttttagaattatcgttataagatgaagcgcgttcgggtcgagaaaggtatggaggtgacgtttttgttttcgtcgcgtcgggtggtcgtgttcgttttggttagggacggtaaattatgttacgcgtttaaagtttagga

SEQ ID NO: 582 - DNA, 430 bp, Artificial Sequence
  Description of Artificial Sequence: Synthetic polynucleotide
gatttttttttgggtattttttttgtcggtttagttttttttttcgttttgcgatttcgtgttttttaagtttcgtcgcggcgattattcggatttatcgcgggcgttacgtcgtcgtcgggtttgcgcgtttcgaggcggagttaggattaggatattcgttagcgtagggtagtttttagttttcgtcgttagttcgcggtttttgtcgcgatttcgtttattgcgggttttttcgttcgttttcgcggtcgggaggtttggatttattttcgggataaggtgattcggtaagtgcgtttaagcggtcgttcgcgattttttcgagcgagcgagcgtgcggggcggtgcggcgttcgtttttgttttttcgttgttaggttttttttttttttgttttttttttagcgtcgttttgttttttacgttt

SEQ ID NO: 583 - DNA, 643 bp, Artificial Sequence
  Description of Artificial Sequence: Synthetic polynucleotide
taggtggagtagtttaagtaggaggtgtttcggttggttcgcgagagagacgtttataaggttaagtgcgagaaattcgttaatttcggttttagggaggcgggttttattagcgatagttttttttttttcgagttttttttgtgagtcgtggtcggttttggttttcgtttttgtttcggttcggattttttgttttacgtttttagttttagattatttcggattttgtttttgtcgcggttttagttttgatttgtttgatttgagcgagagggaggaagggcgcgcgggtcgcgggcgacgggcgggtgcgcgggcgggtaggggattttggttaaggcgagagtagcgtacgttagcgtcgttttttagattcgagtagagtcggagagagagacgagagggtgggaggtttcggagtaatttttttttaggttgaagggcggcgaggtatagtttcgagaagttattaaggttatttggagatttttggttttttgaattttgcgcgttaagtcgggatagttgttttgttgttcggagagtagttcgcgttaggaagagagtaacgaggaaaggagagggattttggcgtttcggtaggcgagaggcgaggttgagcgaaagaaggaaggataga

SEQ ID NO: 584 - DNA, 458 bp, Artificial Sequence
  Description of Artificial Sequence: Synthetic polynucleotide
gtgcggaggtggtttcgtaggtggcgggggagtcgggtgagtagcgtcgttggagtttcgttcgggggttgggggtcggtgtttagaggtttttcggattcgcgcgggtacgaggatcgggtaggggatttgaaagggcgggcgaagcgttcggcgtagagttttgggattcggatttgggcgttttcgtttttcgtttttgtaaattatatttttttggagtttatcgttttttttttcgtttggatttttttagttattttttttaagagttagttaacgagtttgttttttaaatacgttggaaggatgtttagaggattttttagaggttgttttcgggatgcgcgggtattcgagttttcggtttttttggtattgggtttcggttgcgcgtttggaaggtggttttttgttttggggttacgttttaaatgcgttgtttagggaaggtttta

SEQ ID NO: 585 - DNA, 452 bp, Artificial Sequence
  Description of Artificial Sequence: Synthetic polynucleotide
gtaggcgcggatagagtgcgcggcgcgggaaatgcgtatttttttcgttttcgggatttttttttttacgttttcgggataaagattttcgagcgggcggcgttcggaaagtagggttcgttattttgcgtcgttttgggaagtgaagagggagcgcgcgtatagggcggttttttttgttggtcgggtttagtcgaggggagtaataagtgggggcgttttgtattgttaagggtagtgttttcgtacgtcggggcgtagagggggtatgaagaattttggaaattgggtagttttgttcgcgtacgttttttcgtttttgggcggttcgatttagtttttaaaggatgcgtttttatttgtttaggggtttcggggcgtcgggaatttggaggaatatggcgttgtcgttttttggcggaagcgttcgggtttgcgggtaggggtagttt

SEQ ID NO: 586 - DNA, 440 bp, Artificial Sequence
  Description of Artificial Sequence: Synthetic polynucleotide
gcgttggaagaaaaatttttcgcgcgtcggtagaattgtagcgtttttttttagtgatttcgggagtttcggttgtagtcggttttgcgcgtttttttaacgaataatagaaattgttaattttaataatttagagtaggttaacgaggttttgttttttcgattcgaattaaaggtttttcgtttcgtgcgttgttacgagcggtgttttttggggttttaatgtagcgagttgtgttcgaggggttcggaaggcgtaagttgggtagcgatatggggaacgcggagcgggtttcggggtttcggagttttgggttagtatttacgttgttgttgttcgtcgcggcgttattggtcgtgtcggacgtattcgggcgttttttcgaggaggacgaggagttagtggtgtcggagttggagcgcgtttcgggatacgggat

SEQ ID NO: 587 - DNA, 439 bp, Artificial Sequence
  Description of Artificial Sequence: Synthetic polynucleotide
cgggaggaaagagggtgttttttttttttggggagtcggtttttcgtgtattttttgttttcgttgttgggaacgtttggtaggttttgaggttttattgggttttagtttttttaatagtataacggagggggttttttaggtttttagttttagttttttcggttgtttatgggggtttcgtcggcggtggagggaagtttcgttagggggcgttgaaggttcgtaggttttgcgatcgttttttttcgtagggcgtcgttttcgtttcgtttattttgtttcgcgttaggcgtcgaaggggtagttaggtaggaagatattcgttatcgtttgttttagtgttcggatttaaagggaagaaattaaggtttttaggatatttagttgagtggcggaggtcgaattcgaattcgggatcgaggtagagggcgtttcg

SEQ ID NO: 588 - DNA, 396 bp, Artificial Sequence
  Description of Artificial Sequence: Synthetic polynucleotide
gggagatgttggcgttcgtcgtagtttttcgttttatttcgggtttcggcggtagcggttgcggcgggcgttcggtatcgtaggtagcgcggtttcggttcggtttcgattttttttttttatttttatttttatttcgtttcggggattcggcgcggtcgttcggttgtatttcggggcggcggcgggggttcggcgagcggacgggcgcgggggagggatcgcggcgggcgcgcggggggcgcggaggcgaggtcgagcgcggcgcgtaggggtgttcgttttcgtcggtttaagcggtttcggtttttatttcgtttttttcgtaatttttttttttttttcgttagtcgggtttcgtcgtcgcgtcgggtcgggggcgtttcgtatcgtaga

SEQ ID NO: 589 - DNA, 418 bp, Artificial Sequence
  Description of Artificial Sequence: Synthetic polynucleotide
gaaatgagaagtttttcgagtataagcgttttttgagggtgggttattttttcggtttttagttttttataatcgtcggttataaattgtagtttgggaacgttttagtcgtattttagttcgttttcggggatcgtcgttttcgaagcgtaataataagtaatgtagtttgtttatttattttcgtatagatttttagtttttttcgttttttagtagaaacgtttaatagaatcgttaggattagcgagtacgcgtattttagtcggtttcgtttaataggttcgaggcggagaaatcgttttagtagttttttcgtttcgttacgtgtaggcggcggttgttgcggaggcgtagcgggttggcgtggttttttggagcgcgaggcgcgttttgttttaaggtttgtatgattgtt

SEQ ID NO: 590 - DNA, 363 bp, Artificial Sequence
  Description of Artificial Sequence: Synthetic polynucleotide
acgcggatttggagcgcggttattgcgttatcgtagcgatttgggttatttaagtcggcgggattgagaggtcgttgcgcgtgggtaggggtttagattgcgttcgcggtgtttgtttcggtttttatttcggaacgattgtagttttgcggggttcgtcgtttatatcgcgttgaggacgttgtttaagttaggcgttcgttttcgttcgcggttttagtcgttcgtagcgcgtcgtttttagacgcgcgtggttgttggcgagggttgagatcgcgttttcgtcggttagtttttagtagtagcgtattttttttgtttcgcgttttcgtttcggattcgcgtcgtcgtagtttcgcggtg

SEQ ID NO: 591 - DNA, 371 bp, Artificial Sequence
  Description of Artificial Sequence: Synthetic polynucleotide
gcggtcgttatcgtcggcggttcgcgttggcgttcgttttttcgcgggcgttttagattcggggatcgttatttggtagcgttcgtaggttacgggcgttcgtcgttttcggaatcggcggaagggacggggtggggggagcggaggggcggggaggggaagaagagcggtatcgggcgggtttttcgtcgtagggtttttttttcggttatcgtagattttttgatttttcgtttttttcgtttttcgttatttaaagcgtagcgagtcgcggcggcgaggcgagattaagcggtaagttagtgtagcggcgagcggcggggtttcggtttttgatcgagttgcggcgacgtttcgtgtttttttttcgt

SEQ ID NO: 592 - DNA, 397 bp, Artificial Sequence
  Description of Artificial Sequence: Synthetic polynucleotide
gtaaatacgcgtagttggatcgggttgcgggttttggttgagtggtgttggtttgcgttttggcgttgcgttcggggcgcgcgtattttttacgaggatgcgcgtcgagtcggagtattggtcgaaggggttggtgacgttgatgttgtattggtttaggtttgttagttcgtcgtcgcgtattattagtgttattacgttagggttttcgaagacgtagcggtatttgggatcgttacgtagttttttgtcgtttttattttagcggatgaatgggttcgggaaagtcgaaatgcggtaagtgagtttggtcgcgttgttttcgattagtattacgttttttagcggttttagtattcgcggcggttttttttcgcgtagtttttttcgggattta

SEQ ID NO: 593 - DNA, 366 bp, Artificial Sequence
  Description of Artificial Sequence: Synthetic polynucleotide
ttagtttttttttagtcggttggtgggcggttgggagtggggatattggatcggaggggattttttacgggagtattcgttgtttttattcgtttcggaacgcggttggattcggagttttcgatcgtagttcgcgtacgattttcgggagtttgttttcgcggtcgtcgatttacgttcgcgttgtcgttttattgttaggtggttcgagagatgtaggaggaaggaggggcgcgcggggcgggcggaggagggtggagtcgtcggcgcgttttttttttcgggtcggtaggcgggcggcgcggcgggttcggcgcggcggtagaggaggcggcgggcgttgggagatatcggacgttcgttcgg

SEQ ID NO: 594 - DNA, 907 bp, Artificial Sequence
  Description of Artificial Sequence: Synthetic polynucleotide
gtttagtttcgttagttttcggttggtggtcgtgagttcggttcgtaggttggttattttttggttggtcgattggatcgttttatcgatgcggagcgcgagttgtttattgttttttattatgtttaggattttggtttgggggcgagagaggtgataaagagttgtatgatgcgcggggggcgcgcggtcgggtattttcggttttatttgttgtgtttttcgcggttcggtttcgttcgcgtttcgatttttaggtatcggtagcgtcggttttttcggtataggaatgatagcggcgtttttagttttagtcgcggcggtggcgaggcggcggggggaggaggcggaggagaaaaaagaggaggagaaggaggaggaggagtagcgatcgtcgagatttcggcgggcgggcgtcgagagttgttttaagaaggatatcgcgcgttattaggtattttttaaatggagtttattattcgtcgtcggttcgggagggggtttcggtcggaggttgggggtatttttggtttttcgcgttttcgtatttcggagatatatttttcgggggggcggaggcggcggacggtagtcgggagggggttaaggtggcgtttttggcgaggggtaggggtcgtttggatcgaggtcggttttttgtttttttttttgagcggtggggtagttttcgttttggagaattggtgtttcgagtcgtgttaaggttggggaggtgttgggtgttcggaagagagggtgtttggaaagggggttttagaggggagtcggggtggatttttatggaagggagacgtttgcgttagtttaggagtggagttcgtgttttatcggttttttaaattgcgagtacgaaatttttagaggggagttgagttggtgtttcgcg

SEQ ID NO: 595 - DNA, 562 bp, Artificial Sequence
  Description of Artificial Sequence: Synthetic polynucleotide
tgtaagttcgttttcggttacgcgcgtttttcgggttttggtttcgtatttttgtcgtcgtttttacgcgtttttacggatttcgcgcgtttttttttttcggatcgcgagcgtatttatcgatttcgattgtttcggttcgtttcgaagttttcgcgttgtagtttttagttttaggagtagggtttttgggtttacgtttttaaggtaattattttttaggttggttgtgacgttataaaggtcgcggaggttgggcgtttgagggttgggtttgcgggtcgcgggatagggagggcgcggggtcgggttgttgggttcgagttttgggtacgatgttttttttgacgtcgttaggatagcgtttggtttaggtttgggtttggtgaacgcgggtttttttttttgaggtttaatatttcgtatttgggttggttttttttattttgattggtttattcgttacgtgttaagtattgaagagggcgtgtaggatggatatttttggagtaaaaatagttttgttttttttttggggagggatcgtattttttagaggggt

SEQ ID NO: 596 - DNA, 563 bp, Artificial Sequence
  Description of Artificial Sequence: Synthetic polynucleotide
tttgggggcgggtaagggatagggaggttgtcgggattacggatgggtagttacggtggagcgtcggcgacgcgcggaggagtttagttcgagtggggttcgtttgtattggcgtcgtcggtttggcgggacgagttttcggcggtggcggaggtggcgttagggttttcgttttcgatggagttttcgttgttcgtgttgtcgtttgatagtaggcgcgttattcgtaagtcggtttgtagggtgcgtacgtcgttgtcgaagttgagttcgtttaggtcgttaataagttgcgatagtttagtttttatgtcggaggcgttgtttagtagtagaggcggcggttcggttttcgggtttagggagttttcgtcgttttttagcgtttttttacggttattttttagagtatttaataagttttcgtatttaaagtgtatggcgattattagcgtacgttgcgtttcggtttttttttttgttggatttttttttgtcgtacggttttttttttttttcgggtagttttcgggttgttttttttttttttttttttgtagttt

SEQ ID NO: 597 - DNA, 509 bp, Artificial Sequence
  Description of Artificial Sequence: Synthetic polynucleotide
tagttcgggttgtagtcgcgcgcggagttcgagggggtcgagtatcgtgtaggggcggggacggcgtttttttttttttggacgttttttcgattgcgttcgtagggatttcgttttcgtcgcgtttttcgtcgtgtttcgtttcgggttgcgttcgtagttttttattttagtgttcgttcgggaattcgggagtttttcgcgtcggggttaacgtgcggcgtttttcgtcggttatagcgggcgggagacgcgaggcggcgcgggagtaggggaaggaggggaaggagcgggggaggaggggacggacgaaggtagtacgtagtgggcggcggtagggcggaaggagttgagaaagggatcggttcggaagaatttgaatttttgttcggtttttttttttcggtcgggagttcggtttttgtaggtagtaagcggtttgttagtatttattatggttaggtttcggttacgcgttttgttagtattattttatattcgttttcgat

SEQ ID NO: 598 - DNA, 442 bp, Artificial Sequence
  Description of Artificial Sequence: Synthetic polynucleotide
ttagaagggaatttaaattatggtagcgtttagaggtatcggttttagttttattggatgtgtgtgggtcgaggttttcgggtaagggcgagattttcgtcgtgtgggggttttcgaacgcgttttttcgattcgggtattagcgaagtgtttaagaagtgttattggttatttacgtttagtagttttacgttgggtgtagcgttttagttttttttaattttttcgtgtcgtttttcggttaggttggttggtcgtgggcgttttatttttaggaagtcgtcgttttgatagtcgatggagatttggtcgtagtggatggtaatgaatttttcgggttcgttgatgaagaaggttgcgtagtgtagttgcggtcggtcggcggtgaaggtgaattggttttggaggtttagtatgtttaggtattttgggggaggagggt

SEQ ID NO: 599 - DNA, 441 bp, Artificial Sequence
  Description of Artificial Sequence: Synthetic polynucleotide
atcgtcgtcgttatcgagcgtggtcgcgcgggtgtttagtagtagtaggtcgtcgtttttggcggttgtcgagtttagtagtattttgtttcggtcggattttatattttttatgtcgttgtttaagcgtttttcgttcgtcgtcgtcgtcgttgcgtcgttttttatttagagttcggcggcgtcgttttttttttttttcgcgtggtggcggggtatggtattattacgggtatcgcgagggggtcgttagcgtttgcggcgggggtagcggttttatgtgcgtcggcgggttttaaggaggaagtcggcggtcgacggggcgttcgttagttagagatttttgagtcgggggcggggaagtaggtagttagtaaatcgttcgggtttcggggcgggaaaggaggggttgtagaggaggtcgaggagttttaattttta

SEQ ID NO: 600 - DNA, 410 bp, Artificial Sequence
  Description of Artificial Sequence: Synthetic polynucleotide
gggataagcgggtagtatgtttagggcggtcgggagtttattgcgttttggtcgcgggttaatagttcgttgcggtttcggggcgtttttcgaggttacgcgacggttcgtatcggttttttcgtttcggggttttttttgttattttagcggcggggtttttagtaattttgggttttaaggttacggtgagttagggtttcgacggggaggttttgggagggaggaggttgcgggagggtagcgaggggtcggttcgggagtcggtttgagggcgcgttgattttttgtgtcggtgcgttagttttcgcgtttatttgggttgttttcgttgtaggggagatttatcgagtttttacgtagcgtaggttttcgtagttcgataagaaaattttgttgtggatagggcg

SEQ ID NO: 601 - DNA, 1770 bp, Homo sapiens
ccgtttgggtttctaatccggggccggcacctgtctcggcgtcctgccgctgtcccaggccggtggtgctggattccgcggcgcttgggcagaaacgaggaatccccgccaactccacagggaggatctattcccagcccccttatccccctaaaaaacacccaaaccaaaacaatcaccacaacctagaccgtgggcctctgcggacggggcagtagagggtcgggggcaacaaggcacctcggcagcgccctctggcgagaggagagcgcgcaggtcccccgcccgcgccccgctctgccgccgccgccgccgccgccgccgccgccgccggcgcccccgcccggctctccgggttcaccctcggtctctcactccgtgagacacagacggtagctttccgaccgagcggggcacaggctgaggcggcgccagcacaactgccgccgcgcgccccgaggagacccgggcacgaggaaacaaggagaaatcaggactccttccccggaaccgaccggcagctccgcgcccccgcgcgacacccttcgcagccacttcgcggggcgggccaggacttggggacgcggctcgggaagagccggggcgggcggcggcggcggcggcacgggcgcgagggtgcgcgcactgggactggagaggagtgagtggcgggctgggcggcggcggccgtagccgcgggtgcctccccgcctcaccgcttcgcaggcagcaccgcctcccgggccgcggccgcccggccgggtcctctgcgcgttcccgggcccggaaccggcacacgatgcacccggctgcgttctgatcgccgccgcgcctcagcctctgccgcgatgatcccccctgagcagccgcagcagcagctgcagccgccgtcgccagccccgccgaaccatgtggtgaccaccatcgagaacctgccggccgagggcagcggcggcggcgggagcctgtccgcctcctcccgggctggcgtgcgccagaggatccgcaaagtgctgaacaggtgagcggcggcgccgggcgagggcgcggggggcgggggctgcgggcgcccggctccgggtcccctccgtccctggggcggcccacgggtcctttgggacggggttgcggccggaggagactgaggagatcgggcgacgacgcgctccgcgggcgcagagaggccgcggcagctttgtcccggcgcagggagccctggagtggtggagctgcagctggtccgaggcgggagttcggggagaggcggggtttttcgtacctagccaccctgtatgtgtgtccgcactcacaccctccatacgcgtgccgcctcacttccctttccctctcgcaccccggctttgcgatcgggggtcggggggacgcggggacccggccagggctgaggagggaggcgcggggctgcagagatggcgtggaagtcctgggcctcgtgctgtcctccgccccgccccgcccgggggcttcgaccccttgccgggggaatggggtcgcagcgacagcctagcaggcggagggaacccacttctccagcctgacgctccagtcgcctctcggactcttcctggctgggagcagcgaagagagggctagaggcctggaacagacccagcaaagtgcaaaacattgcgggcagggtgtgagccggcggcgcccagttattccgaagcgcccatgccggagggggcgggtgccgatcgccggcgcctccagtgctggaatctgcgtagtggattcaggacgttgacg

SEQ ID NO: 602 - DNA, 1834 bp, Homo sapiens
tcgctccggaatggggaagcggctgcgccctggacggagaggggcggggacttcgcgactgcaggcggagggagggcgggtgtcgctggcgcaggcggtgacagggagacaccgccgccactgagtattcctatgcaagtttcttcatcttcctgtgcatcagtgtttacactggggtaatgataaatgctgtgttgaaaaattatttgatggggccatggaaggaacggaaggaacggcgtcctggcccgctcggggcccgcgcacgccgccaccaagccgcgggggcgggtcggaggggagagttgcgtcagccaggccgctgtcagatgacgagcccggggcgtgacggggtggagcatccccaaaaaagtgcatgcctaggatcccgcccagtgtatccctgcgcgcggcgggccgggctgggcagctttataaacagccgtggtgtgagcctcgaagggaaccatcagcgcctcctgtccacggagctccaggtctacaatggcagcggccgccagccccgcgttccttctgtgcctcccgcttctgcacctgctgtctggctggtcccgggcaggatgggtcggtgagttcggggatgtagcctaagcagggcgggggccaaacctgggaggttgtggactgcagcgggtttcagaggaggggaggcttctggaaggaccggcgcgatctccctgaacgaacatcgcggtctccccgaacgtcgcggtccctccgaacgtcgcggtctccccgaacatcgcggtgcccccgaacatcgctgtctccccgaacatcgcgatctccccgaacatcgtgatctccccagacatgcccagctgaaggcactcagttcccctcggtggctcctttccgccgggtccgcttcctgcggctgctgcttgcccctcaggccaggaggtttctggaaggaccggtgctgtctccccgaacatcgtggtctccccgaacatcgcggcctctccgaacatcgccctctctccgagcaacgcgatctccccgaacatcgcggtctccccgaaaatcgcgatctccccgaacattgccatctcaccgaacatcgcgatctcgccgaacatgcccggctgaaggcactcagttcccctccgcggctcctttccgccgggtctgattcctgcggctgctgcttgccccgcaggccaggaggcttctggtagcaccggcgcgatgcccccgaacatcgcgttctaccccaacatcgcgatccctccgaacatcgtgatcccccccgaacatcgccgtccccccgagtaacgcggtctccccgaacatcgcggtccccccgaacatcgcggtacccccgaacatcgccgtctccccgtacattgcgatcccccgaaacattgcgatctccccgaacatcgcgatctcgccgaacatgcccggctgaaggcactcagttcccctccgcggctcctttcctccgggtccgcttcctgcggctgctgcttgccccataggccaggaggcttctgggtggaccagcgcgatctccccgaatatcgcggtctacccgaacatcgcggcctccccgaacatcgcggtctccccgaacatcgcgatcccccagaacatcgcggcctccccgaacatcgcggtctccccgaacatcgcgatcccccagaacatcgcggtctacccgaacatcgcggcctccccgaacatcgcggtctccccgaacatcgcgatcccccagaacatcgcggtctccccgaacatcgctgtctccccgaacgtgcctggctgaaggcactcagttcccctccggggctcctttccgccgagtccg

SEQ ID NO: 603 - DNA, 950 bp, Homo sapiens
gcggagggcgttcgtcctgggactgcacttgctcccgtcgggtcgcccggcttcaccggacccgcaggctcccggggcagggccggggccagagctcgcgtgtcggcgggacatgcgctgcgtcgcctctaacctcgggctgtgctctttttccaggtggcccgccggtttctgagccttctgccctgcggggacacggtctgcaccctgcccgcggccacggaccatgaccatgaccctccacaccaaagcatctgggatggccctactgcatcagatccaagggaacgagctggagcccctgaaccgtccgcagctcaagatccccctggagcggcccctgggcgaggtgtacctggacagcagcaagcccgccgtgtacaactaccccgagggcgccgcctacgagttcaacgccgcggccgccgccaacgcgcaggtctacggtcagaccggcctcccctacggccccgggtctgaggctgcggcgttcggctccaacggcctggggggtttccccccactcaacagcgtgtctccgagcccgctgatgctactgcacccgccgccgcagctgtcgcctttcctgcagccccacggccagcaggtgccctactacctggagaacgagcccagcggctacacggtgcgcgaggccggcccgccggcattctacaggtacccgcgcccgcgccgcccgtcggggtggccgccgcgcccggcaggagggagggagggagggagggagaagggagagcctagggagctgcgggagccgcgggacgcgcgacccgagggtgcgcgcagggagcccggggcgcgcggcccagcccgggggttctgcgtgcagcccgcgctgcgttcagagtcaagttctctcgccgggcagctgaaaaaaacgtactctccacccacttaccgtccgtgcgagaggcagacccgaaagcccg

SEQ ID NO: 604 - DNA, 1218 bp, Homo sapiens
ccgcgcctgcagttcgtgcacctcttcccggagctgcgccagggaattacggacgaactggaaggggtcgagaagggtcttggccaccacctttagctccaagccttttcgctttttcagatttgggatcctccccggggaggacctcctggcgccccctggcagtttcccgccgcctagggccgacttttccacctccagctcccgggcgggggaggccccgtacggccgcttagacgggctggggcgggaagattgcagcggctttgggtttactccttgtttcttcataatccctagtggagctgggtcaatttcaggcacagcccatccgagtcaggcgaggtccagaaaggcctgactcgcctggcagcctcaacggacttgtccccgcagccgttgactagccgttgacgagcggacctcccggtcgtcatggcgactgtgaaatgtagggtggagcgcatgcgttcgaagccattcgcgcgggcagtccctgcgtgtccccctgcgtgtccccccacgtgctccccagcgcgcgcagcaccccgcctctgcgcttccccgagcgtgcagcttccggtgagggcagccccacgcacagcccccaacaccctccccagcgcctgcagccttcggtgcgcgcagtccccaagcccacatgcgcagttctcaccttgcgcgcagccccacgtacagcccccaacacgctcccagccccactggcgcagaacccatcaccgcttgcccttcacgcgcttcattgggagtgcagctcccaccccgagcgcgcagctccacgcagcctctccacactctccccagcgcttgcagcaccccccagtgcgcacagctctgccagtagcttcccggcgcgccgcccctgcaccgcttcgggccataaccttgctggcgactaagtctgaagaacttcctgtggtttcattcttttcttcaggtttagtcttagctctgacattttaaccaaaaggttacacgttaattaacgaggtattaaaggggaagatctcagctgaaagaaatgactgtaggaagtgtgtcagggaagccaacggaaccgctggcccgccggtggtgcgcccggcattaggaaagtctctacgatcgctgaggtatcgggcagtcagtgcccgttgccaacgcggagggaacgggcggagactgcgggcaacacgtggcagagccggcgtgagtccg

SEQ ID NO: 605 - DNA, 795 bp, Homo sapiens
cggggggctgggcggctgaggccgggaggtgggagaggcgggtcctgcagccccgagagccccccgcggctgcagcggcagctgtcacctcctggcctcgccccacagcacacctgagcctcctgggcagccccgagcccacagctcccagcagaggcgctaactgccctcctcaagcacaggtcgccgcgtccccaactccctgtcctcaccccggcccgcccgtctcctcctccgccctctcccgactgcagcgggggcagcgctttggcgctcccaaggactccccgccactctccccacaaagcagcggcggtggcggcggctgctgctggatcttcacactgcagccagcagcccaggacgcccccggccggacgatgggtacccgcgcctgagcatcccccgggcaggcgccaggcgcgaaggcagggggcgggaggaaaggggcgggggaattcctgattccctggtggaccctggaagttgtccttaaataaatatatcgctggcccgcggttgagcagccacctcgtcagagcagcatgtggactggctcgccgggtcccctccgtgctctgtgctgtcgccgccgccgcctctgtcagagcagcagctgtcggcagcaggagccccgcacggggcgcggagcagggacgcgctgccaccgcctccccctgcgtcctgctggccgcgtcttctcgggaggtggtagtcgctgttgccgctgagaaacccgcccgctttccacggctggtcgcctggtgaggagttgagactctgcgcctccgcccg

SEQ ID NO: 606 - DNA, 686 bp, Homo sapiens
ccggctgacagtgctcggtaagcgggggctcccgctgaagccccggaactggggagggggcgccccgggacgccgggggcgtcgcagggccagtttctgtgccgcgtctcggggctgtgagccaaaaacattcagtacttcggcgccgggacccggctctcagtgctgggtaagctggggccgccgggggaccggggacgagactgcgctcgggtttttgtgcggggctcgggggccgtgaccaagagacccagtacttcgggccaggcacgcggctcctggtgctcggtgagcgcgggctgctggggcgcgggcgcgggcggcttgggtctggtttttgcggggagtccccgggctgtgctctggggccaacgtcctgactttcggggccggcagcaggctgaccgtgctgggtgagttttcgcgggaccacccgggcggcgggattcaggtggaaggcggcggctgcttcgcggcacccggtccggccctgtgctgggagacctgggctgggtccccagggtgggcaggagctcggggagccttagaggtttgcatgcgggggtgcacctccgtgctcctacgagcagtacttcgggccgggcaccaggctcacggtcacaggtgagattcgggcgtctccccaccttccagcccctcggtccccggagtcggagggtggaccg

SEQ ID NO: 607 - DNA, 1565 bp, Homo sapiens
tcgcctttgtagcggacgcccctcgacccacccacccgatcccggccgcaccctgctctgcacccgcaccccacccccagacctcaccctgccctgccgtgcgctcaacagccagatgctgggcccagacaagcgctcttccgctagtgtgccgggatgagcgggggctggacttctagaaaggggtctgcgggcgcaggagctggggtccgcggtctggggccggtgagctgcggcgaagaggtcagggagggagtgggagggtctaccttgcaggagcgcgcagcactggccgtccgcggtgctccagagccgggccgtgccgtcctcgctgcccgtcagcaggcgctgcccgtcggggctcaggctcagccagttgatgcccccgcggtggtcggcgcagaccctcagggccgacccgccgccccccatcccgctggcagggcggggaacaagaaggagctgcgccccgctagggaggggcgccccggggtccgcgcggcggctccgtacgactgcggcccgcggccatcgcggggaacggggagcccgactcctgcggaggcacgcggcgaggggagggtgaaggaccctagctccccgctgcctccagcctctgggcccgcgaacccagggcgctgcggggggcggcccactcgggacctccgccctgggtagagtcctgggcgcgcgggcagagagaacccccttcccagcaccgctcggaggatccacaccccaccgggcgaacaaggcagctgcgtctctggtgcacaaggagccccccgcctcctctcgcgcccacggggctggggcggggagaggaacacgggaagccgagcgccccgcgccctccccggccgagcgcggaacaatacggtccagcctggctcctcctcagagaccacccctcacccgatcccctcccacttctcgggctgcgccccagcccccaccccgcgcgcctgcagcctccccccttcgtcgctgtgcgggtccgggggacggctccacgtgcgaccctcctagctgcccgggctgcgcctctgggctctggcctctgccacctccgccgccgccgcctgggtcccctgagccaagggccgggacgagggagggggaggcggacaaagggtcggggtcggggagaatcgcgcgccgggaactcatttggggcgcagctccaccgacccctcggctactcgcctccaccaggcaagccaggtcctcccatgctctgagccctaaggactctgcccgaggggctctcggggacttgggggcggtcccccaatggagggtgcgacagggaaagccccgagtccgccctccctgggaaatcacgcgcacacccaggattctactttggtctggccggagtggggatgaggtgcgagccgctgcggggtcggtggagccgggatgtcaagttcaccttccagccgccgcgggctccctcggcctggggcgcctctaatggaccccggggtcggcctgagccctcccggagcgcccggcggctggtttccattagggcagttccggcgccgacttcgctggggacg

SEQ ID NO: 608 - DNA, 1911 bp, Homo sapiens
ccgactctcgttcagagacacctgggaaagacgctctcttcgtcagagtgggtcacctagggagaagccgggcagagctgcccccccccggcccgctccccggagcctgcagccgcgtttacccaaaccagctctcctggaaagccagcgggtgcggcgcgcccgagcagggcagcccaccacccgcagccggcagccaaggccgggaaagttggtcctagagcagcgcgggcctgccgggtgctgtccaaggtgctgaaaggtctctgcgggcagctggcgggaggattctgcgcgccctcagcctcccggccacccgctctgcccttccagcctgccgccctgtccccttcccggccgcgcagaagcctccgtccctcctctacgcccaccgagccttccccgctcgggtgccgccaactccgccgcaccgggcgccgcgccccaccgcgtcccgggccgcccgacccctgcccccagcagccacttgcaggtgccgcggtcgctgggctttcaccgccgccccctcctaccttcttctttcggtcacgggagcggtttctccgcttcctgttggattcctccttctccttctgctcctggagggcctgcgcctcgatgtctttgattttcttcagctgtttggccgcttgagccatggcgggtcacggcgctcccgtccccgcctcctggacccctagcgctcagcgatccccgaggcgacaccccctaagaaggggaagggggtctctgctccacagaggggacagcgttcgtggcgccccgagggccggctgctgcggggtcgcgggaaggcgaaggcagttccggacgcggagggcgaggggcggctgcccgcggcccgggatggcgctgccgccgcggccggagctcgcttgccggcgcccgggacgggctctgggcagggcccgccgcctccctccctccgcctccctccctctcctgcggcggcggcggcggcgaagcgggggggcgggggcggggaggcggctcgtactgcggcggcggcgggcggtgagcggccgcggaaggggcggattcgggcgctcagcgcgggaaggcccgggggcccggccggcgcggcgaggctgggcgcactgggcgtccgcacggggtcatggcgagcgccgagcttccgcctttgcagagccccgcgccgtcgggcggcgggaacaaagcggccgctctaccccggaccccgctgcgggccgcagggccaagccgggggaagaggggaggctgcggcgggcggcgcgccccgcgcccgggcgacccggcggaccagcgcgcctggcggcggcgagcgcggcgacatcgcgggagcggaggctcggcctagagggcgggcggcagagggcaaggaccgggcttggggagcccccgggcggtggccgctgagggcccggacgcgctactcccgagcccggggtgcggttcctccccgggcgccctcggcgtggggcgcgcgcctccggggctccctggggaagagccggttccccgcgccgcacgctgggagcttgatttgcccctttcagaccatgtgggcctttcatttgcatatttccgaattatagatgaaaacgtatccaggatcaagtgaattgttttcctttgagtcctcttgggacagaaaaggaagtaggtccccgctccagccccgcccgtcccccatccccggcgctcccgcgcacgcctccctggggacgccgcctgcgcccgtgccccgcggggaagagctgcacttgggtccgcagcgccagcccagcctgcggcaggcggagggggcctagggctcagccaaccaccccgtcacgccgcacaggagccagccggggtccccggctcgggagctgccgcccacccactccctctccatcccgtgggacg

SEQ ID NO: 609 - DNA, 2213 bp, Homo sapiens
ccggctttaaacgcctctccagccacctgtgaaccgcgaaggagccggctttcgcggcggggaccttgccaccagtaccctcgcgggccgaggtcgttctcccggtcggcttcccgcctcacccgaaaaggaattagagcatctacccaagacggtgactggcagggcagatcaaggtgtcctggtctcggccccagccccgcggtgcgccccgcccgcttaccttgaccgggtgcaggtagccatcgccgcgcagggcgcccaacccggcgtccgccggcgcctcggcgtcgtcctgcaggctgcgggtgagatgcgcgatgtaggtggtggccagcagcagcacgtccagcttggacagcttggtgtcgggcggcacggacggcagcgtgcgctgcagctccaggaaagcgtgccgcagggtctgcacccggctgcgctcccgcgccgcattcgccgccgccggccgcccgctcccggaacgcgagccgcccccagggcccgccggccccggcccggtccgcccgggacgcgagtcgcggatggcggcggccaggggcgcgggctcggcgctggcgctgagggggctgcccgctgggcggccgcggtccatggcagcttcccgcgccgcgcgcgctgcaaaggaccgaaggtgcggtgaggccggggggcggtcgggcttaacccgagaggcgcagccccctggttctccccgtgcgcccaccagcagcccaacggggctaagggcgctctcaagcgagctcgttttgcctgggacgcgatttgcttccggacgtctggggagagttgcggaactccggagttcttgggcttcctagaaggataagaagaggcgcagtgccggctttgcttttcaggggcaaattaagcaaaaggtctactctacccgggaagaaagatctcggaagcacagctcaggatcagcactcgttcgcgcttgggtgactttatccaacccggcacgcacgagaggtggcgcggctccttctcgccgacgccgcggaaaaccacggctcaccagccgccctcggcctttcacgccaggggggatttctgcccgaggagcgggggacccttagcctcacctcggggtacggcacccgccaccgttccgagcccgagagctgcgcagtacgcgtctgacgggcccctcacctttcctggagcggctgagtggagctccgctccgtcgtgagggcgggcgaggggcgtggagcagggcctgtgtggccagggccgcgctggtcactccatcctcgtccggccgatgcccaagtcgacggctgtttccaacctccgctggctgtgacttttatgcgggcgccccgcggccaggcgtgtgtgctccgaccggctaaggcaggtcgggcggaggacctggcccaccggagaggctacgccgggggctgaggcggcttagagggtcattaatcaaaccctccggcggggcgggctcgggggcggggcgtcctcctggccccgcccctcggctcactgcctcacgctgctttccccgaggcgcctcgctgagggcggcgtgtggagagtttggggtgtctgccgccggctgcggtggggccgggctggaggccgcgggtgaggcctgtggttaacctcgcgctgccgaggtcttacctcctcgagtccagtctgattccaggccgcttccaggccggtgcccagctgaggcgggaacgctgcagtttggttgagcgtgacttttaggctctgtgaggaaaagtcgagcgcgccacatcgaggcgctagccgtttattctaccacaaggtaaaagattcatgctgtcctagttaccctaaagctgggagatacactgcacttcctaccagaccccgaatgctctcagtgtctgtaattctttaagaagttcctagagcagacagcccttggatcgtgggcacttctccccggggacggggaccctgctgaccgcctccgctgcccccgcgggggccaccgctctttaattatttgggcgaaacattcttttctggttttgcacttgtggactcacgggaagcgtgacttgcagcgaggcaggacccgatcccaggcttctttagaaagcggacgctgcgccccaaggcctgttcagagccgccccaggaagccgtgggtccccgaccgccccaaaccgcagcggtttctgcaggtcctggacccgtcgccttcg

SEQ ID NO: 610 - DNA, 1247 bp, Homo sapiens
tcgtggggcaccacgcgcggacccctgcctggcggctcctgcgcccggggctgctgagcccggggttcgtcctgaggccgcggctgtggttcctggccctcccggcccgcgtcactgtcgcgcggcgcccgctgcatcttgccttccttgcggcttcgcatgcccttggtggaacccagctcggcggacgacgaggaggatgagatggaagcctgctggaaaccgggcaaatcccacagaaaactgatgaggaagacggccgagagcaggaccctgggagtatccatggcgggcaagtggctgcgtctccccaggaggcggtggcggcggcgcaggacgcgcggggcacggagcggctggacagcggccggggcccggctcctcgggcggactcggagtgcgaggagccgggtcccagccacacaaaccccggccccgccacgccccctcccgcccctcgccgggaggggaggaatggggagggagggcagaggaggggtggggagggtgggaggagagccgggtggtgcgggccggaggtgtgggggagaggggccgcggtgcgccggtgtggcaggaagacgcagcgcccccgcgggacgcgcgcggggttgccgggcggtgcgcgcggcgcgggccgcaagcgctgaccgggggaaggcgggcgctgccggcccgtggccggggagcaaaggctggcccgccgcgccagggtccccctcgaactcccggaggtgtggtccctccgcagcgcggccccggctctcggtcctcgccagccgcctccactttcctgggagcgagcggccccggaggagggaagcggcggcggcgcccccaagagacagcttggagcaggcgcctctgctgcaggctgcgtgctgcctcggggcggtggtaccctccctcctcggccccaaccgccaggcctgccgtttgcgcccctcaggggccagcccggagccagagaagcctcgccctgggccaggcgcagggcccagctcggaacagccccattttctcggttgggtatcgctctccacaaagacaggcgtctattcccgaccctcgaggtcaggcaaaggccacgagtctttagagtttggatcgatgctaaaagctgctgcgctcccctgcaggccccagcctctcctctcgcagtccccaacctcttctgacgcagactttagctgctccacttcttcgtctgctcccgggatcctctccctctcgcggcctgccccccg

SEQ ID NO: 611 - DNA, 1861 bp, Homo sapiens
ccggtgagcagagccggcgcagccacagcgcggagccgcggcgcccactggtcctcggagctgccaatcggcgtgtaatcctgtaggaatttctcccgggtttatctgggagtcacactgccgcctcctctccccagtcgcccaggggagcccggagaagcaggctcaggagggagggagccagaggaaaagaagaggaggagaaggaggaggacccggggagggaggcgcggcgcgggaggaggaggggcgcagccgcggagccagtggccccgcttggacgcgctgctctccagatacccccggagctccagccgcgcggatcgcgcgctcccgccgctctgcccctaaacttctgccgtagctccctttcaagccagcgaatttattccttaaaaccagaaactgaacctcggcacgggaaaggagtccgcggaggagcaaaaccacagcagagcaagaagagcttcagagagcagccttcccggagcaccaactccgtgtcgggagtgcagaaaccaacaagtgagagggcgccgcgttcccggggcgcagctgcgggcggcgggagcaggcgcaggaggaggaagcgagcgcccccgagccccgagcccgagtccccgagcctgagccgcaatcgctgcggtactctgctccggattcgtgtgcgcgggctgcgccgagcgctgggcaggaggcttcgttttgccctggttgcaagcagcggctgggagcagccggtccctggggaatatgcggcgcgcgtggatcctgctcaccttgggcttggtggcctgcgtgtcggcggagtcggtgagtgggccaggcggaggatgcgcgcgccgtttagggtgtttgaagctacgagaggagcccgcagggaataggggagcgccacctggggaacccccagtccccaagtatacaccggagatccgctgggacaaatgcgctcgtccggtcaccctttccccctcttcccttcctcagaaaagcgctgctcgctggcgttaccccgcggtccgcgggaatgggggcaccgagaattgcggtttggtctagccgcagaggcccctgaagtcactcccaacttcttcgccctcggcgggtcttgctgcgtggtctgggaaggacggaggggaaagggtggcaggaggggggagcctgggtcgggcccgcgagggaacggctccactccgcgcgctcctcgagaccagggatgacctggaaacttcggggtcccttcctccgcacaccatcccccccgcgccagctttcctgtttgactgcatgcaagttctggggagatgggggccagatttaagagacccgcgagtgtccagagagaaaagtttgcaaaagttcttttgtttgatgctccctgcggctagggcgaggtaaccgacactacgtggaatcgcagtaggcgatccctcaaggggatactgggggaggcacggaacgcgtccgaaaatgctgggacgccggccactggattcccagtcctgcggcgaccccctcctcgttgaggggtggaggttgcaccgcggggcgtcagggacgggaggacattttcataggagttacacgggagtgccgcaagcagggcgaggcggggtacgtgtgacacggcgctcggcttcgggtcgcctggccgctgggggacagaggcttccctcccgccacgctcgccctctctggccctggcggggcgcttctggggccgggaggagtctcgtctccggcggagcgcctgccggcacccagcttccctcccccgccctggcggtgggaacttgatttctccttttggtcgcgcttcgggggctggagcttgtttccccacgtcgcccaatgagcg

SEQ ID NO: 612 - DNA, 3378 bp, Homo sapiens
gcgagcgcggagccggagagccgggagcacaggcggccgcgccgcgtcctggcccggcccgggcccgcgcgccagcatcgtccgcagcgcgggcatccggaccctccgggcgcccggggggctccagcaggcgcgggggaacgggagggggcctgcgtgcgccggcgggtgctctccagggggcgtcccggcgaggcccagagcgggccgggggcggcggcggctggaggagccccccccacctccggtcgggcgcccggctcagccgccggcgacgcgaggcgctcgcggggatttgcaactcgccggatcgagtcctcgccggcggggccgctgctgctggggaaggtaaggaaggctccggcggggggctgggggcgcggcgggtgggggcgcagcgagggtgggagggggtcgggggaggggcgggcgcccagacttcctaacttcgccgtttggggcttcgcagctccgaggttttgcgctcagagctcaggagtttggacccccaccccctaccccctcagccccctgccttctccagcggtggcgatggaatgtggcaggtccccgcgagcccgcattgggcaggctgaggagggggcgaccctggacgcaggagaggctcctcggcgccgccgcctcctccccatccacacaccacagcctggcacccctcttcatcacatgcacagggcaggctggggagggcgttcccgctgtacccccagcacacacagacgctggcgggggtctaagggagccccccatggcccccaacagccacacatagacgcagcaggctccggagagcccccgagcgtgtccccctcctgctaatcacgtccagggccccctacagacattgtaagggcccgagacgtcctccccccacgcacagagctcggggcaggcaggagaaaaccccagactccttctcgaagccctcgctcgtagaagccctcgcctgtagacctggcattggcagtggagactccctggaggtactctcccccacttcgggcggagggctatttttgcgccccccacccccacgcgaacgcctggctcttccctccttgtctacctttccactgggtcggacaggccgcgcggataagccgctctcaactttgggccggccctatgccgtctccgctccaagcgccgagcactcccgggcgccgagcactcccgggtccgcgtcgccggtgagcagaggccgccggccctccaccgtcgccgcgctagcttggagccgcgcggagctgcctcgaggaacgagcacggcccccgccccctcctggggaggctgggagctctggacccggccaggagccctctccctaggtccccgcggccccctgggcgaggtagagagctcctccggcctcgggagggggcggcggagctgagaatcaccgcgaagcgatgcgaccgggagggcttgacggaggctgcggctccgagcccgcgtccctcctcctggccgcggcggctcctgcttggccactccccggcagcctgaagagaacgcctaatctggcaccccagccccaggccgctgggcaccttacccctttccacttttattttgggcttctaagtttcttggagcgcaggcgcctaggctgggacccgaagagccctaagccagccctctttcagcacccgtccccgccgcgacctccccgttcttcctccgggtctggggcgcagattcctgggctgcaactccggagtagttgaaaggcaggaaggcgtgtgggcgggtagggggcctgcactcccgccccagaggagccgcttgtcgtttgtgttggggagggagctgggaggtctgctctcccgctccatcctgggaacccacggagaccctcggtactctccccacagacacaaacacacgccccctcggagcgagagccgccgcgggggaacagcagaggccgcgcgggcggaggcgggggaaaggggagctgggtcccttttctatctgggagggaggtggtatacggtgtgtggggtctggggaggcgactgtcacgtctcctagaaccctcatgccttccactcgtctgcgaccccggctgccgaggaggcaacgagggaggtcgagccgctccctcccgtgggcggcagcgaaactctgcgcccgcacgccggggtgccgccgagtccggctttgagtacccagcaaggtcaagcaggcgaaggagggggcgggggttcctgggcgcgcccccgtccgcgcacagtcggggccttggaagggggtgtgcgcagcccgccgagtcagtcccgctcgcctgccgcccgcgcccggtccccggaggcggacgttgcgcgcgttcggggatcccggagcgcccggcgccccacgccctcccttcggctcgctagctgctccttggcgctgctttcagacttgttgcgcctcgatctggggggcagaaggctggcccgggagacccggcggctgagggccgagccgcgaagcccagggatgcgccagagaggcgcgcggctccgcgggtgggcgctgcgctggggggctcgagcctggggtttgccgcctccgatcccagggacgggcgcttgttcctgccggggtcccgcgcaggggcggatagagggcgattcgtcgcctcggcctcaggcagcactcatccggatcccgggctagggagggggcgcagccaagttgtggagccctcggaggcccttccctctcccgcaggctccggcccctctcggacctcggtggccgcgtccgtgaaatggggacgcgggctctgctctcggatcccttccagcccccgaccctccgcacttgtcccgagatccaacgtgcccggtccgcagcgtgctgggtctgcggcgtcagggtggcccgagtcccgagaccatctgcgcttgcggacacagccgcggggcctggcatgaagggccccagggagggcctagcaagcgcccggggtccgagcagcctcctgcggcgtcctccgcccccggtcggcccgaccccgcctccgggagtgggtcgtggggcgcggagcccgtcctccggggacgccgcggggctccaggcccaggcggccggcgcggggccgcagtggcggaaggcggagggccggcgcgctgccgctgactgccgggagagggcgcccgcaccgcgcccgcgcggccctgcccgccccttccgtctcctccgcgcctggcccgcggctccggccccatcttgggcagccccggccgccacctccctcccgcccgcccgcccgcccgctcgctcgctcgctcgccgtccgctcccgccgccgggtcccgtgacgcgcctcgcgtctcggccggagcccccctcgccggcccggcccg

SEQ ID NO: 613 - DNA, 1646 bp, Homo sapiens
ccgccaccagcccacgcgcgcagtgggcgtacacgtggtgacctgcctgcggctgggttcccagctccggctcctcctccctccagctctcgctcggcttcctgcagtatcacgtgcagctgcgctgggtgcaggatggcggcggccgcggcggcggcagcagcggtgggtgtcaggctccgggactgctgcagccgaggcgctgtgctcctgctcttcttttccctgtctcctcggcccccggccgccgccgcctggctgctgggcctgcggcccgaggacactgctggaggccgcgtgtccctggaggggggcaccctgcgcgccgccgaaggcaccagcttcctcctgcgtgtctatttccagccaggaccgccggccaccgccgcaccggtgccctcaccgaccctcaactcgggggagaatggcaccggcgactgggctccgcggctcgtgttcatcgaggagcccccgggcggtggcggcgtggcccccagcgcggtccccactcgccccccgggaccgcagcgctgcagggagcagagcgactgggcatcggacgtggaagtcctggggcccttgcgtcccgggggcgtggcaggctcggccctggtccaggtgcgagtgcgggagctgcgcaagggcgaagcggagcggggcggcgcgggcggtggcgggaagctcttttcactctgcgcctgggatgggcgcgcgtggcaccaccacggcgccgccggcggcttcctgctgcgcgttcgcccgcggttgtacggcccaggcggggacctgctgccccctgcgtggctgcgggcgctcggggcgctcctgctgctagccttgtcggccctgttcagcggcctgcgcctgagcctgctgtcgctggacccggtggagttacgggtgctgcggaacagcggctcggccgccgagcaggagcaggcgcgccgcgtgcaggccgttcgcggcagggggacccatctgctctgcaccctactcctgggccaagccggagccaacgcggccctggctggctggctgtacacctcgctgccgccgggcttcgggggcaccggggaagactacagcgaagaggggatccacttcccgtggctgccggcgctcgtgtgcaccggcgcggtattcctgggcgccgaaatctgcccctactcagtgtgttcgcggcacgggctggccatcgcctcgcacagcgtgtgcctgacccggcttctgatggcagccgccttccccgtgtgctacccgctgggccgcctgctggactgggcgctgcgccaggagataagcaccttctacacgcgggagaagttgctggagacgttgcgggccgcagacccctacagtgacctggtgaaggaggagctcaacatcatacagggtgccctggagctgcgcaccaaagttgtggaggaggtgctgacccccctgggagactgcttcatgctgcgctcagacgcggtgctcgacttcgccactgtctccgagatcctgcgcagcggctacactcgcatcccagtgtacgagggtgaccagcggcacaacattgtggacattttatttgtcaaggacttggccttcgtggaccccgacgactgcaccccgctcctcactgtcacccgcttctacaaccg

SEQ ID NO: 614 - DNA, 3723 bp, Homo sapiens
gcgcccgagggccgggacgcacgcacgggccgggtaggatggcgctggcgtcgatgcccgcgcgcttcagggcctggtctggccgcccctccatccttgtcggtttctcgggtcgcggaccccgcgcggcgccgggcgatgctggcctgcccgtggccaccacctcgcttcattcccgtctctttgggccgccgcattcgtccacgtgcccgtctctccctgcgcaaaattccaagatgagcaaatactgggctcacggtggagcgccgcgggggcccccctgagccggggcgggtcgggggcgggaccagggtccggccggggcgtgcccgaggggagggactccccggcttgcgacccggcgttgtccgcggtgctcagcgcccgcccgggcgcgccatggggaaccgcagcaccgcggacgcggacgggctgctggctgggcgcgggccggccgcgggggcatctgcgggggcatctgcggggctggctgggcagggcgcggcggcgctggtggggggcgtgctgctcatcggcgcggtgctcgcggggaactcgctcgtgtgcgtgagcgtggccaccgagcgcgccctgcagacgcccaccaactccttcatcgtgagcctggcggccgccgacctcctcctcgctctcctggtgctgccgctcttcgtctactccgaggtgagccgcgtccggccgcacgagcatcctcacctgctcctcggttccccgtccctgtccctacggaggacccggcgcgacccggcccctttctggtgcggagcttccagctggggcggcggcaggggcgctgcgccttgtccctcggcgatacacccaccgccgccacctcgcgaccttccacccgctgcgctgtctgtcccccgaccctcgttcctcttctccttccccgtctgtcttggcgtctgttatccaggagatgcccgtccttctatccagggaccccggaaacaggcgactttgtcaagcccagtcccctccgtagctggatttcacctccagggcagccagctggacagacaggcagatgcaggctcagccccctggctgccgtgggacacacacacacacacactgccacagccactgcccaccacacacacctagtgcagatgctggcacacccccagaaggaggctcacagctcgcaggggagacctgggctggacaaaacccaggggaggggagggtgtgtggggaccaggcccctgctgagaaccctggggggaagcctgagggggaattgggggatggagcccacactccacaccaggtctggccctcgagtgggtcggccttggtgccagcccctctgcggccagagaaaagcagcttagggctgagctggagacgcggtgtccccgactgtgggggagggggactcgaggtttccccttgatggacacagtgaatccaggcggctggggcagagaccagcagcacgggacacgcgtgacctgtgctcctttcgagccgcagacgtcacagtgacgacgtttaagctcctaatctccccaaatcggcgggaaggattagaggggctgcctgctcctttgcccttggagagagtcactccacgtggagtcctacgctgggcactgggcacggtcttcatatttttaattataatttatcttcaagacaattatgatgtggatactatcatcacccttgtcttacagatgaagaaacagaaatgaattaacgtgcccgagtctcccacagagaacttagccaacagagcagccagcttcgcttctaggcccagcggggaccctgcctaccccaggctggggaggggctccctttgagcccgatgatatcaggcccgcccccagggaattccccaggccgttctcatgtttgtaacaaaagggagaccaaggccagaagccgtgattcacgcctgtaatcccaggactttgggaggcaaaggcaggaggatagtttgagaccagcctgggaaacataccaggcctggtctctacaaaaaattttaaaatatcagccgggggtggtggctgcggctgttgtcccagctattcgggggagctgaggcggcagaatcgcttaaacctgggaggcggaggttgcagtgagttgagatctcaccactgcactccagcctgggcaacaagagcgaaactccgtctcaaaaaacaaaaagaaaaacaaatcagccgggggtggtggcgcgcggctgtaatcccagctactctggagactgaggtgggaggatcgcttgagctcaggaattccaggctacagtgagccatgatggagccacagcactccagccgcggtgacacagcgagaccctaactcaaaacaaagggagatctgcgtggggaaggggtgtttccctgcccggtcctctggcctctggctcacagccgggcccccttctccgtattcagccctggaactacccataagagtgggggcgggtcacaagggcccgcggtggctgggaaacctcagggcctgtggtgtcgccgcgcaggtccagggtggcgcgtggctgctgagcccccgcctgtgcgacgccctcatggccatggacgtcatgctgtgcaccgcctccatcttcaacctgtgcgccatcagcgtggacaggtgcgccgccctccccgcccgcgccccggcgcccccgcgccccgcccgccgccctcaccgcggcctgtgcgctgtccggcgccccctcggcgctccccgcaggttcgtggccgtggccgtgccgctgcgctacaaccggcagggtgggagccgccggcagctgctgctcatcggcgccacgtggctgctgtccgcggcggtggcggcgcccgtactgtgcggcctcaacgacgtgcgcggccgcgaccccgccgtgtgccgcctggaggaccgcgactacgtggtctactcgtccgtgtgctccttcttcctaccctgcccgctcatgctgctgctctactgggccacgttccgcggcctgcagcgctgggaggtggcacgtcgcgccaagctgcacggccgcgcgccccgccgacccagcggccctggcccgccttcccccacgccacccgcgccccgcctcccccaggacccctgcggccccgactgtgcgccccccgcgcccggccttccccggggtccctgcggccccgactgtgcgcccgccgcgcccagcctcccccaggacccctgcggccccgactgtgcgccccccgcgcccggcctccccccggacccctgcggctccaactgtgctccccccgacgccgtcagagccgccgcgctcccaccccagactccaccgcagacccgcaggaggcggcgtgccaagatcaccggccgggagcgcaaggccatgagggtcctgccggtggtggtcggtgggttcctgtcctgaggggcggggaggagaggagggggggggtacgaggccggctgggcggggggcgctaacgcggctctcggcgcccccaggggccttcctgctgtgctggacgcccttcttcgtggtgcacatcacgcaggcgctgtgtcctgcctgctccgtgcccccgcggctggtcagcgccgtcacctggctgggctacgtcaacagcgccctcaaccccgtcatctacactgtcttcaacgccgagttccgcaacgtcttccgcaaggccctgcgtgcctgctgctgagccgggcacccccggacgccccccg

SEQ ID NO: 615 - DNA, 554 bp, Homo sapiens
ccgccaaaggcgtagcacctcggacacccccgggcccaccgtcgcccccctcgccccctgctgcccccaaagtcccaccacacttctgggccgggcggcaggagtggggacgggagtggaggtcttgcggagcagcggctcggggagctgtgggctgcgggctgggcggggcggcgcgatgcggggcgggcggctcagccccgctccccctaccggcgccctcaggggatgaatgtccctcctgacggtctctttacttattgatggactaatcctgctcgttaattccccagccctcgttaaaaatgaaaaggagccgtttgtgcttgtacaaacccaagagccaggatggatgtgcgggggtggggcgggcggcgcctccgcattggccaccggctcagccacgcccatggaggggagcgggcagaggggagggggcgcggtgcttagagtgggggctctattctcagtctgcgcgtgtgtgcctgcggtgctttatgcgggaggcagggcgtgtgtgtgtgtgtgcgcgtgtgtgtagctgctcgcgtgcg

SEQ ID NO: 616 - DNA, 1101 bp, Homo sapiens
gcgccaagccggctccccaacctggtctgctgaacgcaaaccgctgagagtttgctgcaccgccccctggggcccctggctgccgagtcccgctaaggcaaagacgccagcaagcgaggaagcgcagcggaagaaaaacaagcgggcgcgcgaggggagccccaggagggctgccgagtggctggcaggcggctcccgcccctcccgggtggcctcgccggcggctgacggcccggaggacgcgcgctccgaaaagttagactccgggcggcggcgcgctacgccgcgtcccctcgcgtcccttcctcgctgcgctccgggaaaggaacttgttccttcggccccaggattggggagtgtgccgcggggccgagggtggggaacagccagagggagacgcgaaccaggccgctggcggagggctcagggggagcgcagaggcgacggcccccatgccggcggccaacatgatggagaaccggccgctgcccgccctgcaggtgcccgagccgcagggtgcgcccgagggcagcccggtctggtccagttcgtcgacccccacgcttcgccgccggcgcttcaagatgcgccgcatgaagaacgtacaggagcagagcctggaggccgggctggcccgggacctgcccgccgtcttggcccccggcaaggagttcctgcagctgccgtccatcgagatcacgccctccagcgacgaggacaccccgtggtccaactgctccacacccagcgcgtccccgcgccgaaaacgcttcctcctccgcaagtggctgagggtgagggagcggaaggagtgcagtgaaagcaggtacgtccccgttccgcccgtctccttcccttccctcccgtcctctccagagccgtccagggccccggggcattctgggggaaacgtcctgggggagaacaggagcccgtcaccagaggcgcttctggagggcgctgcgcctggtcccagggatggtggcattcagcttccacgcgtgccacccgctccccaactcagggtgaggggcttcatgttgcacgacacgtttacgtggggctttacgctgcattccatctcccttgatcctcgcagcg

SEQ ID NO: 617 - DNA, 548 bp, Homo sapiens
gcgtaggcgcttgccattaccgtcagtgtgtcttgaccaagcgcctcttgctgcttccacgtccgggcagcagcagcagcagtcgcgaaagggtagggtccaggtggctgtgacggaggccgaagaggagctgttggcagagaagcagcttcttgcctaggttgggacccggagctgggttttgggggtcgccgccctgcaggctggcaaggagagactcgtgagcgcctgtgtgtctgccagggaaacagcacgggatacaggcgcgcgggtgcgggtgcgcgtgtacatgcgtatgtgtgtgtgcgcgcgcgcgtgtgtgtatgtgtgagggtgtgacggaggcgcccacgtgctcggcccgcccgtgttacggccgcctaccggctgcagaggagaagggtaggctgtgggcggcggcggggcgcggaggggtagccaggagcgcaggctgggctccgcacctccctgccccaaaacccattgatgcagcggccactgcggctgccgagcggcgtcttcccagagcccggggctgtgcccgcccg

SEQ ID NO: 618 - DNA, 1153 bp, Homo sapiens
ccgccccctccgtagagaccgctagctgaggctgcaacacctgccccggcaaagcgtctccgcagccttcccggcttgcccgactcggcttcctccgcctctgccccggctgcggcaccacttcttggagccacgtctcggcgagcgggggccgcggagcgagggggccgctgtgccgctactcacccgagccgctcgggctggccgcgagccgggatccgcgagggctggcgggctctggcccccgaggacgcagacatgtggcttgaacctccgctcccctagccgttgcctctgtgcatctttctgggcgcccccagcgaatgcgagcggcgaggcgagggcgagcgcgccgaggaagggcgggagaggcgcggagcttggccgcgccgcgctgcgccgagcgccgggctctccccgcgagctccccgggcccgcgcgcgcgccccccactgcccccgccccccgcgcggcgcgtgccccccaccccccgccgcgcgccctcgcacccgcccggctccacgcggcgcgcgcctgccctggcggcagcggcggcggcggcggcgcgtcctcccccgaacgccgtctccagggctgctggctgcgctctccattgttccgcggctgctgcccggggtgggcggcgaggcgggggggaggtgtcggcttggccgccggggagggcttaccgctcgggcggaccctcactgcgagagcgatgcgggcccaggcgcggcgcgcgggggctgcagggcgcctagcactgggggttgccggcgcgcgggggcctcctcctggctcccaggcactcgctgctgctgggcgcccctcgcatcctcggttactatggatatctcgctcctccgccgccccctccgcgcactccgggaggccgccggggcggtagcagcggcgcggctccgcgggtgcccaggtgaccggctcggcagcggcagagcagtggcagcagccgccactgccgctgttactgcggtcgccgccgctggagagaggaggacgaggagggcaaggggcagaagcaggtcctgctctgtctgccccagaggccacctcgggtttcttctcactaaccaagcgacttcgtgtttacctcgcaggagacgcctcggcagtcctcaacttgtgtgcgccg

SEQ ID NO: 619 - DNA, 1146 bp, Homo sapiens
tcgggagggcctggccgaggatttggggcgccccgagactcgcgtgtcagcgccggtggcgctcagggccgagatctgtctcctccccttcctcctcctccgccccctcccctctccctcccggagcacggccgaggcctcctcccacccgcgagatcccggcggccgccagccggctcctgcgtccgtccgtcggccgggcagtctgtccacgcgcggaaagctcggcgcggcggccgaggggcctgggagggaacgggcgcggaggcgggaccgcggctccctcccactccggggggagcccaggaggcggcggtgctggagcgcgagccggagccggagccggagacgaagagaggcggtgagaacgcgggtgcttagggaccccacccccggctcccgctgggggcccgcgagcggctcggggacgtctgggctggggaagcggggctgttacccccagggcgggaggcagagacgatccagctcctggcttcgccccctccgcgacgcgacccccgaggggccctgggccgcgcctgcagcgccgcgcatccccgtgcttcccggcgcaccccagcgcacccggcatccccccggcagggcgagggccccgggggaagggaaggctccgggagccaaggagggcgccccccaggcggagagtctcggaaaaccgcgcccccggcccctgccttccctccaggcctgccccaagggaaagcgggcggggcgaccccgtacgccccccttgctgtcccccttcggttccccattgttctcagccgaatgctctcctgggaaggggggagggggtgctgcgctctcctcttaaagggccctctcccctcttgtctcctggcaggtcgcgagcacgagtggggtggggcgtgcccacgggcccccgcccccctcgtccccctcgtcccccagcccagctccggagccgcagtccaggcgcgccgcccgagggtccacgccgcacccctcccccgtgcgttctgcggccacccaggccttccaggacaccgtggagagggaacaagggggcagggacgcccccttcggcaggagccgtcggagaagggggcccagaccggagggaggcgagaagccccactgaagccgggcgcagggtctgggacg

SEQ ID NO: 620 - DNA, 961 bp, Homo sapiens
tcgccttccccgacacctaaaagccccggtcctgcgtaatattgcggatccctcccagcctcccgtccgctcctcctcccgcggggctccgctcagggccggtcccccgcccccacgccgcagcccgggccagcggggcccgccgcggtggcgttcgcggatgctgccgcattggccgctgcggcacggacggcgcagcctcgggcgcggcccggcacaggcgccggcggtccccgccagctagcagcccggcgaggcgctggcccacccatggtcctcgggcggcggcccctgcgcccagccctgcgcgtagcctccgtctctcgcccggggccgccgagcccccgacacgggcgagatgctgaacggcgcaggcctggacaaagctcttaagatgtccctgccgcggaggtcgaggatccgctcgtccgtgggtgagctgggaggggcgcggcgagggagggtgggcccggggcgggggcggcgcggggcgcgcctgcggttatgcgacactgccccgcccgcgccccgctcccctccctgggctccctgggctctctgggctgcaggatccgccgacgcggcgcgctggccgcacgggggctgggcgtcgctgcacctgcggggccaaaaggctccaggccggggcgaggtgagcggcgggcgtcagagacccccggctcgtccctgtacagatgtgtgtgtgtgtgtgcggcctccctgtgcgcgtgcccgtgcgcccctacgcgcggatgcggctcagggatgcgacctaggcggcagtcaccgcgatggtgggcacggtttggcggcgcagagaagatgcagccttccctgccggcggccggcaccgctgtgctgcagagctcaaaagcagagggggaaaaaggcatccgaagggtccctcgagtgattctcaccacttggagccccgggtcctcgcgcgctcacagcggcgacg

SEQ ID NO: 621 - DNA, 1040 bp, Homo sapiens
ccgctcacacgcgggcgcaggagctcgccccacacatctcccttccccggctctcggggcaccccagtaccctgataccggcagcggggtgcacccctgcagtcgctacctaaggaagacgcaggaggcacaaggcggggtggaggcgccgcgcagggacggaggtccacccgcccagatgtggggagatccgcgggaggggatcccgcccggcccggtgagccccgctgggagagtggtgtgcggcgctggttggcaacaggcgcccacggtcgagagagaggcagaggggctgtgccacccgtcgccgcgccccgctcctctggcgcacatctggcaggcgccccagcgccccggcagcggccagttttccctccttcggggccggtcctgccgcgtgacccctttcccgccgaggcagcctccacccgcatccccgggcgctcgtgtagccctcacctggcaaacaggacggtgccgtgctccagcgggctgcggctcactgcccgccagctctgccggatcagctcgggctccgggcgctccatgctgtcccggggacgcggagcgcggggctgggaccctcagggctcgggtgccgtcaccgcacgtgccgcgccatctcctccgcgacgcggtcccctccgcccctcgtacgccccccgtgcctccgcccggcgggggccgcagccgctccttccctggcgcgggagagaaaaggcgcgcggccagtcgtaggtggagacaccccagctgtgcttccggggaccccgcttggccgctgcgccctgcgccccgcagccgccagagccgccccaccccgcgacgcctgggctgggcgctttaaagccgccacggcccccgccccctccaggccagcaaggcgcgcgctccctccgccagccgctatggtggcctgggaaaggcccggcctgcagaacgtaactgacatcgcggaggctctctgggcctcagtttctcctcccgagccccgagggcactgtgttgaatttggtcgcctcaggtaggcgctgcatgcg

SEQ ID NO: 622 - DNA, 1497 bp, Homo sapiens
gcggctccacccgcgggctcccgggctgggacccggggtgtcacccgcagtgctgagcgtttgtgctctgagacctcgttgtccccaagggtctctccaccctccgggccccggcctccggccccgcctggcatgaggagcggggagcgcacagcagggtgggggcaccgggcgcacgcggggaatttccccacgaccacggccacgccaaatgcctgaacctccacggctgccggcaacagcgagcgcagggagggggctgtgcgcgcgggggccctggtggcggagcaggcatcaccccgagagcgccgaggtttgtggtcgcaaccccgggagcaccgctgcgggaggagcggcgtggccgggcagaggcgacttcctcgcaggcagtaccgggccccgcggccgcctccgggcctgtcctggtgccccgggcttccacccggcgggctggcgtgcgggggctggtcttcgccgagatcctgctgggagcgggctctggccccacggtgagcccggccccagcctcggtgatgcgcttcgctgccgcgcggggagggagagtccggcagggtcacgaggcgccggccccggggccgcttgaaacccgaagagaccccgctcgctcgcgcgcccgccggacgaatcctcgcggaggtcccggggcgcagccggcgtgagggtggggtctcatcgcaggggcgccgggagcctccccgctccgctagctcaaccaaggaccgctcagaggggctctcaccctgaacctcggcttttctaaaggaagggcagaccccagatttcccccttctcttctcgaacgtgctttgggtgtttttctgctttcttttttggcaagtcaggacagcgcacagtgcacggagctccgaagctctctcagctactcccggatttctggttaaacctgagggtgagcccgaaagaccgctgccgccggcggccaccccagcgcgggtccgctgagaatggaaacagcaagtgcgcgccggccaggccgccacctctccctcctccaacagcccgggcagccgcaggggccagccccgggccagccagggcccagcacaaaatgccttccagcgacagcagcgccggaagccccttctgaggtcgtggataagcctccgcgcaggggccccgcgctcagcccaccccgcatgcctccgcgccagggcctgctggtgggtggccgcctgccccgggctatcccgggctgggcactggcgccgatcccgcctcgcttgtggagctgcatttggggggaaagatggaccggcagcgtgggacgcagagccaggccaggccgcacgggctgtgcacaaagatatgcccgacaggcggggagaaggcatggcccaccggctcaggagaaagtcctggaggggaggcagtccgcccctggggacaacgcggggggccgtattcggacaccaccagaagttcctgtcggagacgctaagggtgcccacggtgtcg

SEQ ID NO: 623 - DNA, 1845 bp, Homo sapiens
ccgagcggcggggcgcagggtgcgagcgggaggctggtgttctgcccgcgatgggcaggggagccgggtggccgcggggcgaggagccgcgagggccgggccggcgtgacaccacctggcggagtctcggggaagagtcttaaaggcgcgcgctcctccgtgccccgcgcactcgaacgggagccgcggagagctcgcctcccgctgccgccggcgcctcggggaggtaagtgccacccgcggatcccgagtcgcggccgggtgggggcggcccgcggctgccccgcgctcgggaagctctggctggggctgcggtcggagggcggcgcccaagttttcttgaaggcctcggagggcagctggagcggcgtagagcctgcgcggggatggcgggggtggccgcgggccggggccgtctgggggcggccatcccgggcggtgcgtggaaaagtaggcactggtgcgcggcgaggggcgcacgccagagccccagccccgcgtcctgcgcacttggcgcgctctggccgcggtcccggcgagccccagcctgctccgggccgcgaccccggctccgcgccttcctgcccgcccgggtcctttgtagcccgctggccccgcggtcgcgcacggtcacgccggcaggtcgcgctcggcggccggccaagccagccccggccctgccgcgcccgcgccccgggccaccccgcccggccccctcggcgctgcacccctcgctttccccatctccagccgctcgctattttcacacctcccggtgccccggccccggcgcctgattcagtgcttagtaattaatttggcgtttcagaatggtcagcgggctggataatgggtgcattcatcccccgggctaatctgaacagaggtgggaagaaaggctttcacagacagaaaatgccattcgccgagcgctcaaaggggctgtcactcccagaataaatcgccgccgcgcccgccggctcctctggccatttccatacagctccggcccgcgccgcggacccgccggcctcggcctcggctcccgggaatcactcactcgagtgccttcgacgggaaagtcgggcgagagctggacccaggcgggggccgagggaaacggggaaactggagactcgggtgaaggccgcaggggacaaagagattgattagaaaatcaaacgcgcatctagaaggaggcgcaggcgactgctcaaggcgcggacggcggagctggggctcgggagcgtccgtccaaaacccccgaggttcgccaaagaggagggcccgcggcccagaccctccggagcgtgcccgaggcgacacggcaagcttctggggctcccaaattgtgaatggagttcaatgcacaagcatagatagtagaaacagggtcgacctgcacagactttttattccgagttccttgtgctatcagccccgtcgccctcgcggcctggaaggtgacacggtgtcttccccggcctcctgctcgccacccctgttgggaccctcgggtccgcctggggacatctgctgagcgggtgacggaggctttatcctttgatcccttctggatccggtgacgcgctaagtgttgggcacgtacggcctacggagtttgaatgctggggccttcctgttgcggcacccccagcccactggtgcagcgggatcgtgcgctcccgccgcagccctaatccagaggaccgcgccgcgccagcgccttcagccaggctgtggcgcctccagtgggtagggctggctcggctctagccaggtgaagctccagactctggattttcccgtcttcggggttcagcgtgtatccacctcacccggccg

SEQ ID NO: 624 - DNA, 408 bp, Homo sapiens
gcgctcggctgtcaggcaatccggtccccggttccccacggcggtctcctcggtgtgccccaccaagagcgacagggctggtgacccgaggggcgcgtgcgcggtcgtcagcctgggatttgcacggacccccttctccctagtacgctcgctcgggggcccctcctctgctacgccgctggggctcgcccgccacccacagccctcgcagagccctccgggcacaccgcggctggccgcccggggccaaggatggggcgggagcgcccacccacccccgcgccggccggggcatccaagaggcgcgctcgcagccacacggcgccccgcctcccgctccgaaaaagctcctgctcccctggcgcggtgtggcgtctccgtcagcccagccggattctccccgcttcg

SEQ ID NO: 625 - DNA, 3276 bp, Homo sapiens
cggctgtactgctgcggggtgcaagggcgggggaaaccacaccgttaggcgaggcgcggggaccgtgctggaaggcccgcggcgcggtcccctctgggcgactgcgggggcggcctggcagggagctggggcgagtggccgccgcggggcctcgcaggcgcggggaggcaccggccgggcacccgcgcggctgaggcgagggcgggggatgcctggccgggtagggaacggggtgggggagggcagaggggcgagcgagccggagggggaaccggagccgagggcgcgcgcggacctcgaggttctccaggcgggttttgagcgattgcaaagtttgcccgagttggctgagcgtctcggcggccggtgtccgggacaggtcgcccatggtgttcttgcccgagccgggctgcttgcggccgccgcccgcccgggcctcgccggctccggggtccagcgtgctctggctctcgcagcggcccagcttggcggtcagctcgcggatggtctccttctggctcaggatggtctccttctgctgcagcaccgtctcgcggagctgcagcacgctgctccggagctcctcggcgccgccggcggccacggacgcggcgcacatgtcggcgtccacgggcaccgaggtgcagatgaagcgcgtcggcccgaaatcctgggccccggcgcccaggaggcagagggcgagcagcgcacaggtgcgcgcggcgcggccggccggcatggctgcgggcaccgggcgctccgggcccggctcggctcggctggggctcggctccggctgggacccggctcgggctgtggctccgcgagcggcccgcgctctgggcgccgcgctcttcggccgcgcggtccacaccgccgcgctatcaggcccccactgccgcctgcgctgcggagcccgcgccttttatgccgccgcgggaggggcctcgagccgccgacgtcagcgggggaggaatcccgctttaattgtccgcggcccgggcccgcggcgcggcgggggtctcacgagcgcgccaccggggctgcctccgctcgcgtcccccccgcccttctgggagctgccgcggccccctcctcccccgcccccgcctgggccggcgctgctgccccgaaggctccgagagctcagggggaaggaagtcgggctccggccccggactcgaggatggaccacctgcgtggtgtccccgaacctccgacggggctccaggcgggcgggaaaccaccgcgtccgggagatagaattcggttcggccctcctggctgcactgaacacccttgggccggggtcgtttggagccgggctgggtgcccaaggacccaggtcgtcaacacccgagtgcccggtggtcaacggctcggagtggggcctcgcggcgccactaagtccagagcgggggtcaccgggccgccccgcgtttcttagatgtccgtgtgctattgagaagccgccgggcagcctgggtacagggacttcccacgggtcggggcccccggcgcctcccctcccccagctcccgggctctgtggacccggccccgtccccgggggactgtcagtccccaccccgtgcgggcggggcgctggggacttctcggaggcagacctagctgatcgagcctttcctgtccgcggcgccggcccgatcgcgggcaggcggcgtcgccggggctggacgttcgcagcggcgcttcggaagggggccccgcgggagcagccgcccgcgtctccagcagcttccccttgccaggcgccgcgcgcgcccggtatccccgggtgtccacctgtgcgtggggggctgtttcccgtctgtccagccgcgcccacttctcaggcccaaaggccagcaggaagggtcccggaggtggctgggggcgtccacctgagaagctccgctctcgctcagacaccccacccggcacccgcgcactcgcgccttcatctggaccgcggggctcggctcccgagatcgcggtccgggttccggcgccgggctgggggctcaggaccagggctggcgcagccgccccgccccgccccgccccggggctatcagagcggtcaaagcctcggaaatccctccgtccacgctcccgtggtacagagaaggaaactgaggctccgagactgcggggccgggctacagccgtggccccccgacccctccccgccgcccccggcttctctggtctctgcgttctgcagcctttccctgcgcgcagccgggggctgggggtccccagccagcagggacccacgggcagtcccgggtgccgggatcgggcgtccgcccctcgggcgggagcagaggccggctcgatggagacctttttgagaaatggcggcctctacccgccccccagcccccgagcgcccgccgtctgcgttcagcatctcagcttttaagcctccctgagccggggctgcgttctcgttgtctccttcggccgccgcttcctggcgccagagggaccccgcggcccgcacgggcctgtcctcggctccgctcggagggtgtgcgggttcccgctccgctggccccgcttgcccaccacggcgcgcccaaacccacgcggcccgcggccccttgcgtgctctgccgaccccgggccgcaggaggggttagcctcgccggtccccacgcggggtctgcgccggcagcgccacgggctggaacgcgcctcgggagaaattacccgcgcggggtcgcggcgtcttctgccccaactcccgtagggagccgctaggcgggtgccctcctggccccagcgctttggcctcgccgccctcccgcacgcgtccagtggggaggccgcgcccgtcaggcctggagccggaccgtgcccagccgagagcgcgcgggcgcgggagaggagccctgccctgcccagggcaggctgtttagacggggcgggaacccttagcctggccccgcgtctctatccccagcagccgtggagccttcctagccgcccaaggccagggaccctgcctggcttttcctccagggcagcagatctcagcggcctggcacctcggcacagaggagcgtgtcccccttccgcagaggaagggagtggacggcgtcagaaagggaggggagcctggggcggtgtctggggctagcgggacctctgggcactgtggggccccaggagaggagaccctcgggtccagcctgcaactgttgtgcaggaggcgctgggcgggacacctgcaggcgctgcacacacacgcgagggccaccatgccgcg

SEQ ID NO: 626 - DNA, 1160 bp, Homo sapiens
gcgcgtccggtgccccaaggcttccaggcggagcgcgggcgcgaggtgcgggctccggggcggagcgcacgcccgggaggcgggaagtgggcagcagcgcccccgcctggcccctgtgcgccccgacccgacgcctccccgcccgaccaggtgcctcgagagcgcacagctgggagggctctcccggtcgcggcgagactcacgcctgcggtgtgctagggcggcggcgacggtgacgggcgtggggcgcggcgctgcctcggctgccgggtcgttgcggcgagcgcgcgggccggcctggagtcaccgggctgaaccgccgcgcctgcatcgtgccgcacgccgcggaggcgctcgggtacagaccgcgcgggcgcgcacaaagcggcccggggcggccggcgcggcgcagaccctcggtgggcagcgcactccagtcttcccaggctagcggctgcagggagctccggcccgcggcccctccgcctcaagtctgggagctgccggtcccactctgtctttgcctatggggattcgagagtttcccagcggcgcacccaggggcaagagcattgccgtgtgagtagcgccccgggcgtgggtgagcgagccggcgggcgggaggccggagcgccggggtagccctttgcagctgggacactgggcagtctgaggctcggggaagggcggcgcgcgcggtggagctgctcgggaagtttcagtcattctttccctcgccactcgccccaacccgcactgccccgagacgcccaggatagggcactggggacagctgcccggggaagtgggtgagtggcggcgggaagggaggagcgcgggctctgccgcggcgctcgcccccggagggccccggccgcgctcttgctctcgccctgggatctgctcctcacgaatcccctcctctctgtccatgctccccctgcccacccacctgcccgtggcgcctgcgaccgcagtggcatgaggaggtcaccggacgtcagcccccggagactgtccgacatcagcccccagctccggcagctcaagtacttggtggtggacgaggcgattaaggaggatctgaaatggtcgcgctccgtggaggatctcaccagcgggccggtggggctcacgtccatcgaggagcggatcctgcg

SEQ ID NO: 627 - DNA, 1134 bp, Homo sapiens
ccgaaaaacacgttctaggcgccgggattccagatacctgggaaatagagtgcacgcagctgttgagaggcctcgcgcttggcttctcctatcactgaggcgcagaggtgctgtggacagcccagacccacacggcgcccgaggtgaaacagaaccctcagtctccctatgaggccactggcactctcggctgtccccagagctctccgacttagagctgaatgcaaagtaagcgctcgaaatgcagaagtagccggggccgcccacggcacctgcctcgctcggggcgagagaagacgccaggctgaggtcccagcgacctcaggcaccagctccgaaggagggcggggagaccgcaaaggggaagtgcccggagggccaacggcccccgcgcaccctgcgcccctctgaagcgcgccgcctccccgcgccggggactgggacctgcctctggggaatccgcctagaagacggcggcggactggggtcgggcactctccagggctgtcaggccctccccagccctgcacctgccgcgccgccccacctcgccaggaagtctcagagaccccggggatggggtgggagcgccttcccatcgcgggctcaaaaagaaggaaggacgcccccaggggtcgtagaaggaggactagctccaagccacaactttcttcggacccaaggcaggccggctggggctccgcgcctacacggcccctggcgggggtccgcgcgccccgggagccccgcggctcggggaggaaagaggagacaagagacaggcgaggattacggggctgacccagccggggtagggaccatcgtggaaaaactttggcgaggtggggggacgcggaaagagagcggcccgcgccctgcaccttgcgccgggcatcccgcgccagtgcctcgctcccagtgccccgcgccccgcgccccgcgccttgccttcaccccgggccagctgcatcgcgcccgcgccgcaggaaccgtggagttggaaagtgggggcgccgcggctggggggctgcttcagctgcgcctcggccagcgatcggcgggccgggctcaaatccagccaggctgggcaggcggtggccgcgcgactggggaccgggcgccccgccctcctcg

SEQ ID NO: 628 - DNA, 10783 bp, Homo sapiens
tcgcggagacatctcgagtcccgcaggtgtctgagctgcgctgcgcgccccagccgggaagccttttcttatccaaccgcgccgccccgcggaaagcctgggtactgcagacgccctcaccggcccaccgacagctggttttgaagcgggggcttagaaaagtaaaggggacagtgtttggagccacgatgcctttgatgtgaggcggttccacccaacaatcaacgaatcaagctggaactgcaggccctacttttgttggggggaggaccttaaggaatgtcacccccttgtcccctaccctctgccccacgcccagcctctcagaaggcaccaggcgtgagtagagtgcgaggcgtccacaccctcgtgtcccttccattcccggacacctttgcaccctagccgaggcctcagcacggagtgagggttgcctggggtgccctgctgtgtgtggggcgttcttgcctcccgggccctgaccccacggtctgggtcggcgaggcgtctctccctggcgtctggactgtgcgcctgccccgcttccaggcgacgaacggcaggagccgggggtccggcgggacccggatccagggcgggcggaaggcgagggtctctccttcccggaacccccgccccggaaacctgcaaccaaaccgggtccctcctccgcatcgctcccgcgctcccgggccgcctccccacgcgggcacccactctccgggccctcgcagcaccgccctctccgcgtccacccgcgcggccgacgccgccaggggccctgagatcgcggagacagcgcgccctggcgcctggtggggccctcccagtggccagagcgctcctggaccagtcggctgtggtctgtgcccaaacacgatggaaaccggggctgggacgggcggtggtacgcacgtggaggagaagaggcatggcgggaaaaccacagccgaacacaggtcgactcgcacctcccaggcacccgccgccgtctgactcgcggctctccccaaggttccgactcgccgccacctcttggcaccactcaccgggctccgacccgggccgcgagtccgctgatgcgcagctgcctccggcggctcccgggctctgcccggacccgcgcgcagagacgctcgggaacgctgggctcgggcgcctcctggcggcggcagcacgcggcacacgctcggttctccggcccgagggggcgcgtggagcgtacgcgggatccgcgcgcgggcctgggctgctggcccacatttccccgcttgctcggatggcggcgctgaggcctattcgcctctttattaataacgatgcctcgggagggaaaaaatagagcctttaaaaatcagagtgcgagagaggagtgtgtgtgtgtgtgtgtgtgtgtgtgtgtgtgtgtgtctcggggcgttggtgaaagcaataaaactcagatcgcttccttggcgagatagcggcggctataatgcgccggggggatcaggggtttatttgcagatcctggataaaagatgatatatcgacacggtttagagtgtcactgcgcttggcctctcagggagccacaagtacatatttcctgaaataccgcccagcacagtatctaatccgcccgccacttaacaccgggaggggaacttcagcagcgcacaagcgcgctcccggtttcctggttctgggtggggagagcccaaatgagaaggatctggtatgcctagacgccccctcccctggcctttgtcttcagtccaagtaatcacttagcgatgggccttaataaatacgtctgagaactgtccttatgctcggtaaatattggattagcttttcaatgaccaggctcttgaaaaggctcgagaaatacacaccaggtctcaactaagcccaacagtcaataggtaaggaaataagttatttccccatctgaggtggggaatgttgggaagggggacttccactcttaccaaattatctgattctactaaatatgaccgttgtactaaataggaaagggggcgcatccaagtttcccattagtcggaatttccaccagctcagttctgctcattaagggccgagtgactttgtggggaacatatctgggttccagtttttatttccacagagctcagcataaactatttttgtttagtacatatggtttatttggggactgcttatgggagttttgacctggcaattgcaggggagaaggcatgacccaaattatttccgactgcctcgcgccaatttggaccgcttagaggaggcaaaaaatgggcaaattccttggaagccctgctgtgtctccctggtactgaattttgtaagcacgcgatacaggagacattgaaaattaaagaggaagtatctccctcctccaacatggggagagacgctgttggaagaagtttctgaagtggtttcccatcgcaccaagaggccagtgggatggatccccgcgcataattcaaaggaacgcgcgcgtctttagctcttcggggttggtaaccaagtggtccggccgggcgcaagtcgccttggaaccggctgcagcccaagtctagctgggcccgggactgagcggcacccttggcctctcagaacctttctcgcggtgagtggaagggcggctccgcgcgcgggcgcttcggggccggtcggttgcgaaatcagggggtggattttcatctacccaggagccgctaagcccgtaggggaccgagcatcacccaggccctgggtaccctgagttgcctcctgagccccaggacggtccgatggtgcagagctcccaggcagaagttagtttcctgatacacacacagcagtgagcaaagtgcgcacaagtgagccaaaccctgaagacgcaggttcgcggactcccatcccagcgttagagtcaaggagacagaagagaggaaggagagaagtgaggaagggagagagattatgagaaaaagagattatgaaagtagagaaagagattatgagagcgagattatgagaagagagaaaaagagagattttgagagagagagacagaatgagagagatccaactttcagtgtcacggggcctaggcggggcaagcgccctccgaagccatcaaagacaggggtggctttttctcccctcctccagcctcctccccaatagatatagcacgaatttttaatgcgtcttcctttcacagacaacaatacagggtttgaaagccggacacaatttaggttttgtgcgggtccctcctcgcgctccctcggcccagctggccatatggaatccagcatggagcccgtggatgacaaagggacccagtgacaggcccaacaaaaccccaaggagacttctgcctgactccgggattcactgccggcgataagcgcgctgaatggtgcggggtggggcggggggtggggggcgggccccttctccttcttcccctctctctgtccccgcgatcctttctctgtccctttttaatatgcacgcctctaacatctccggctcccagctttcccattgtgcggttttgtaccgcccgctgtagattgggcgaagatagactgctgaagcggaccccgcgccgggtgcgctcccagggcgctggggttagggccacacagggctccgcaggcgcttttattgactccatggggacccgaggacagagagaggcgggcgccgggtccacctcccgggctcccggccggccacaggagcgcacacccagattgcaggcccgcggtcctggccacagctccaaatttgtcctcaatgagcaagtggtggaagcctgccagggtgaggaccttccacgcttcccccttcctctctggaaacctgagggtctcttgtgatcattctcaccctggaagccctggggcctggaaaagtcaaaatggcctcaggccttctgacagctccgctccaagagacttgaaaccctcacctttcctcccaagaggattttgggattaggggaagttgcaagtggatgttgagtggttagtaccagggcaggttgggcgttcaattattgcacaacaaactatttgggagaaattcgttggcctttaaaaacagtaagacataagcccccaaacattgccaagctagtgtggagaacaaagggagaccttttagcatttagaaaaactgccctttccccgaggatgagcccggagatgggaaaggacctttactggggtattagaaagacttccgagccctcaattatccaggggcggtgtggaacgcgggaataaagtgtcatcgcgtccctgggctgctgcgcagagtgctatcgacgcacagatttggtcgcacggataatcatgtttgctttagatattgaattaaacctgatcatcaactacagggagcgagaaagtcagctgggaccgctccttttgcccggcctcctcactgccacccaaccccccagccttgatggtgcagcttcggagagaacagagatacaatttccaaatgcgccgacgttcagtccctcagcgtctgcagcacccgctgggctctgagctagagtcccaagtatttttagaaacccgcgagatagaggagaaaggctcatcctccagttggccaggcttcctaagacgctcccccgcgtggccaagtgtgcgccagcatctgccaaggagatcttcctccagcaacaagggtgggacggaatccgttccccgccggaaagatggatgcgcccttcccgggcgtgcccggggctgtgtgcccacttcccatccggggagctcaccccacccccaaacctctacttcctagcaatccacccagttccacgctcaagggctgacctggggggaccgcacaccctggttcggaccgccgaacgctggagggaaggaggcccgggatccagtccccggagagaggcctggaagcccggaaaggatgggagcgtaagggaagggagaggcatggtttgctgggattgccaaagattctcgctccctggcttcctggggccaaagatcctagggagggctgcagtatcccctccctcccccgagcccagaaccccgcgtacttcccccaagccccctaagccaaagcctcgcgcgccctgaccgttcccacccccagccttagcggtctcctaggtcagcaccagcccgcagattttgaaaaggagtggggagtggggagaaggcagccagtcttaacctcagacccccacccacccactttcttagcgtgaggtaagtcaaatgtaacaaagtgaaagtcatcgagtgtagtggcttcaacagcttctcaggctgaaggagccactcatagatttgggccagcgaggggggtttgctctcctcgcctttgcggctcccgaagtcacttttcctcccgtagccggacgctgccgcccggggttcagacagcgcgcgagaccaggggagatgcgggggagggtgggcggccctgggcttccggccgaccgctcgcaggccggaggccgagcgttctcctccccgccccaatcctaggcgcggggtgcagcctgtggtcggaggggcctgcaccgggagccccgcccgccccagggccccggtacccccggcctccccgcccgagaggaaccgcctgtgggagccccgcgggcggccgggcccggctcccaggcccaggcctccggcccggcgcagtaggacaaacgggagggcagggattttttctttttttcttttttaaacacaggatttttattaaaattcttatttaaaaaatcgaaagctttctgcgcccggcgctgttggggaaccgcgccgaatagctgagctccaagttcggggctgaaggcccggaggacagggcagagggctccctgcctacagggttttcttttccatatttgagaaatgtttgcacaataaaataaaaagagaaaggaagaaagcaggggaaaacgcaaaaacaaaaacaaaacaaaaaacaaacccaaacaagccacaaagaaaggagttggacccagacgggaaacaggccggtcctgaaggtcattttggcaacaatcaccaccgatatttacaacgaaaagcgaaatctgccaccagttgtcagaacgtttacatggccataaatatttagcattttcttatttttttttaaaaaaaggaagaaattctctgtatttttaaagtgttctccacttgctttagaagacggctgacaatatcgctactcacacaaacatattttacaaaatgcacgaaagcaggggtggggggtcggtctttttctcgttttcaagtgacgacattaacgctgggacggtttggtccccccggggagaggcaaagaagcgaagctgcgcaaacattctgtaaacacggcgtagagttcagccctctcccaaggttcagaaggagaggcatgggcagagctgggtgggtggaatctgccactccaaggagacgcaggcaacctcccggcgcctccctagtggagccgagagtcaactcgactccataataataattataataataataataaccaccataaggaccgaggcctcctcgccgccaccgccgccggggtggggcctgggcctggggccgcgagtctcgttggggcggcgctcaccaagtccactgctgggcctggaccagggggtgtgctgtcgggtactggggggtgctggccgagctgtactgggcgttgtactgcatgtgctgcagcgactgcgcgctgtaggcagaaaagggaatgcccgcctggaaggtggcggctgccaggtcctgggctttgagcgcgtgacatggtttgccgtccctgaccaagacgggcacggccacccggcgcggcgagggcaggggcgtcacctccatacctttctcggcccgggcgcgcttcatcttgtagcggtggttctggaaccagatcttgacctgcgtgggcgtgaggcggatgaggctggccaggtgttcgcgctcgggcgccgacaggtaccgctgctgccgaaagcgccgctccagctcgtaggtctgcgccttggagaaaagcactcgccgctttcgcttcttgccggcgtcccccccgccgcccggggtctccttgtcattgtccggtgactcgtcggccgagggctccggggacttggagcttgagtcctgagggggcgccccggcagccagaccgtgcactggggggagggggagagagaagcgcgtcaggcgtctggaggccgcgcgcagcctgcaccagactcggagcaccctggatcctccgtgcgaccctggacctccgcgcctggcagcccagccccgctgcctttgccatgacccctgccttcctctacgcctgacgaagacgtcgggacctcccagggtaaagagggaaatccgtaggagtgggggctaggggctcgcctttcaaggggctcacatagtgtgggtgagaatttggggggggaagtggcactgaagatcatcgcgggttaagggctccggcgcccttaagcggtttcctctccggcgagacgtgggcagatttttaaaagaaataccccacaatcccagcattgatcggctcggccatttaaggcaggtttttgggggctttcgtttctgctttcgggccttctagacaccccctgcactgcacaaagcgtcctctatgatcgcgcagggggcagggtgagctatttatacccgggccacccgaagcctccccaccctccacccgtacccggacgaggctcgctggctacctccagggcgccaggccagtccctcccagcggccggagtccgggggctgcggctggagccatcggtccgggttgacatcatataccagcccctgggaggtatagcccttctccctctttctccttaacttctcgcattgaaaaaaattttggagaccaagttctttcccggaactaaggaggcttgaagaggagggcagaggacatcctatacaggtgttaaaaatctttctacggatccgagtgagggggtccgggcttacatggccccttcccctttcactcccagcgtccaacccgggctgcggctgcaggaatggaggggaccacggcctcggcagccaagttttgctacttacgggagtactgaaggccctcggtgctggccagccagcgcgtgtacgggttgtcgctgctgtcgtagaaggggttcttcaggggcaggctctgcaccgcgtccagggcgccctgccccagcggcccggccctcttggctggctcgggcccctcgttctcttcctccggaccttcggccacagagccctcctcatcgttggtgtccggcaggtctaagatgtccttgaccgaaaaccccgtctttgtgttggtcagcgacatggttcgagaccccaaaatttatgtcgcaaagttgtagcttcacttggtcaattcgtggcgctcccctgccccggcgggcgggggaggggggagttggggggagggactgggggaggggaggggggaattggctttaattattgggataattattatttttaaaaagagaaagaaactggggatggggaggaaaaaaatgaagcccaacccagtgcctctctctgtcttctttgaaagcacgcggaaatggacgcaggaagccgggcggcctgcgcgccgagcgccgcgggccccggccttagtttctaactccaggaggggtgccaaggcggcgtcagctcgggctccggcggccgctcggcgcgcggtggcggctggtggcgaggaaaaaatgggccattgcccgagcgatcagtccatataaggctgggctccactcacgaacctggggaggcggggagagggggagaaagagagggagggagggaaagaaagagggagggagggggagcgagagagggagcgggagaagggtggaaaaaagggggaagagacattaaaaacgcaaaggttggccacgtgtgggcgggtcttgggagtcaagtggatgaagacagtatttgcagatgtgaaattgtgggttttggggagctccgcgctcccagccaacggccctctagagcaagatgagaggtgtaacgtgtcaattaattgcaaagacggggcgagcctttttttttttaaacccagtatttacatacaaagggccaccgcgtcgctcgcgagtccacacacttgaaagggccgttttaacaaattgcatcttaaaaaaggtgggggtggggaggaggaggggagaaaacaaaacagaaaccaggaggagggaaaaaatcctctttaacattcaccggttcctacctccccgcccccgcgcgcccacccccggcaagccggaaaattggcgatttgtggcgcctttggaaaagggggagggggcgaaggccgagctgcggaaatctctcctttccatcgttggtggttgcctaaacaagatccggttcaaatggcaagagcccaacttctgtaagcctcctaggtcaatattttggttgaggcttaaggatgagtgctagaaatgacaaggcaagtaattgattccagttaaccgcgagagagcccaaaacccaggagagagctccgctccgggccggccagagccaccaccaagcgacccgcccccttccagccgccctttatttgctaaagactcatttatttccttcactccgcctccccccacctcccacccccaaccccccgcctccacctctctgcggccaaggaggacgcgcagttcactttctgctttgcgggcggtcccggggagggcggggtaagagtgaggagctccaacttcgtctggggtcggaccctggccctgctgcctctgggctctgcgggcctctttccccgggtggaggaaagggcagacggccctgctctttcctgccctctattatccctccctctccggccccctccctctccagcctctggctagaggtggagcagcgggaaggcggcggggcgggattgcgggggtgggggtgggggttgtgtctccagcctgggtgaagacccagaaagctgcgggggaggggggtcgctgggtggcccgacgatgcctcgttttctccccagttttcttctcccacgcgagttctttagtgtggtctctttttggacgccttgggtgcgttcggagtacgcgctccacgtttccaggttaagtcaggttagtgtgaagtttccagccactctcggctctgggaactgaactttcccgggacttgcacttcctcctcggcgctggggttggaaaagaccacgccgcatttgccaccccttcttctagttaaaacttttttggggggggggtgcaggggtgtagattggctacctgatgctcgttcgccccagaggagtgtcaggaaggagctttgtctgggggcggggaggggcacagaaggccacccctgcggggtccaggtctagtcttcccacaacctgggctcctccgcgcgggccaagctgagcgcgcgggcaccgggtcctcctcgcgcgcagctgcagcggacgccgccgcgccccagctgcccccgggttgccagcgctgggtgagggcacctctccccgagccgctcggcggctttctgcagccctagctgcctcgcccccagtatgtgacgtgggtgacaatggcccaggttagagcaagcccctcgtcggcgcgtcctgggtggtcggacccgggcaaacacaaatacaaaccgattgctaagctgcggacaatgagcgaaatgtagacaaatgtcccgctcccgttggaagcctttgtcccggctcg

SEQ ID NO: 629 - DNA, 2194 bp, Homo sapiens
ccgcgggccaccatctggacgcgatcccccgctagggcctccctggtctgggccaaagttggtggccaccttcgcgcgggctgcgccctccttctcttccctgccctcctcccccggggcccgcgcccgctgcctccagcacgcgcgtcggcaggctcggcaagcgaagaggagcggctcgccccagggcgcccctcgcccagcctgccggccaggcgagcgcgacgagagtctccccgcaccccttcctctcccgggggccgagagggttgggctccgccccggcgccgcagctcccgactccccgccgctcgggctgccgccgctgccccgcgcccggcgctcggggcagccgggggcgcaggcggagagcgcagggcggggagaggcgtggggagcagagcggcgctgaggggagggcagaggaggagagagcctggcagcggaggagcagaggcgggcgccgcaccgccccgcacgctcgctcgctcgggagagtcgcgggcggccgcttgggcgcacttgccgggtcaccttgtcccggaggtaagtccagacctcccggccgcgggggcgggcggaggggcccgcagtgggcggggtcgcggcaggggccgcgagctggcggcgggagctggaggctgccctgcgctggcgggtgtcctagtcctggctccgcctcggagcgcgcagacccggcggcggcgtggcgcccgcggtaagtccgggtggtcgccgcgacgagacttgggagacacggggtcgcagggcgggagggggagctgagccggcagagaaaatgcccaggaaggggtcgatgctggcctgggctgcaccttggtgccttgccaccccgggagacgcgaaggggctgctgtgcgaattcgatgggagctggtgagaccgagaactgagagcgtagcggagccaggctgcccagcagggccatgagggcgcgcggcgggccaaggctctgcgggttcgggctgcccctcggagtgacccgaaggagaccagccagggctggtgagccgggcggccacggagctggggacctaggtctgtttgggagtaggaagggaaacagactaattctccgagcggagcggcaggcaaggtgcaagcgcgcttgggatggggaatcccgacgggcgaccgtggcggaagcagagactcctggagcctctttcctctagccaggacaagacctgccttcaaaagctgtctggcccctggcagccgcgacagcctgcagccctgggagccacagccctggcgccgagatgggagcgagcacatacgcttttttggttccaatttgaatctcgctttttcctagtcgtgatttctgcctcttcatgtgcactctctgggcagtgaggaggaaggaatggctcactggatgagttgggcacttttcttagggaaggggctttgtccctatgcgctttttgcaagaccctactagagtggctctggcagccgagctttgaggaggcggccagaggggccgcttggcgtttctgaaagacgagaggaaggggtcttctggtagtcctgttttcctttgggggtttcgttgcacgcagaggcttgggcgcttggcacccagacttcaggtgcgcacagtcctcctgcgacgtcagatgcgctggcgccgcggcgctcctggctcggaccgatgcctgcgccttccctggccacgtcctggtgtttagtgcagcagacaccggccgaaggcttggctgattgggggtgtcgaggggaggggggctgggcgttacacagtggctccgttttctggttggaatcagttggtgaggcgtgcgcgcgcgagtccgtgtatctgtccgtctccctcctacagcccagcgtgtttggtctgagtccaaagaaggaggtggtgtgtgtgctgcgtagacctgcgcctgtggggtgagcagcctcatagcccccagagccggccaacttctccgtgctaggctgcgacctcaagggctgccgcgtcggggatcggaagtggtcttcaaagaggggtctaggtcgcgaaatcctggcagcagccgaagtgaaaaggagctgctaggaggcgggcggggggcagtctgatgtccgttctggcgcggacaggaagaaactgaagtcgaatttttagttgaattgcgtgctctgtgtttggcggtggtgtggcccg

SEQ ID NO: 630 - DNA, 284 bp, Homo sapiens
tcgctcagcctcgcctctcgcctgccgggacgccagagtccctctcctttcctcgttgctctcttcctggcgcggactactctccgggcagcaaagcagctgtcccggcttaacgcgcaaagttcagaaagccaggagtctccagatggccttggtgacttctcgggactatgcctcgccgcccttcagcctggagagaagttactccgggacctcccaccctctcgtctctctctccggctctgctcgagtctaggaggcggcgctggcgtgcgctactctcg

SEQ ID NO: 631 - DNA, 603 bp, Homo sapiens
gcgcgcagccgaagcccagtgccaaggaggccggagactcgggtgcccgcgcatcccgaaaacagcctctgaggggtcctctgagcatccttccagcgtgtttgggaggcaaactcgttgactagctcttgagaggagtggctagaggaatccaggcggggaaggggacggtggactccaggagagtgtaatttacaaaggcggggggcggggacgcccaggtccgagtcccaggactctgcgccggacgcttcgcccgccctttcaggtcccctgcccggtcctcgtacccgcgcgggtccggagaacctctgagcaccggcccccagcccccgggcggggctccagcggcgctactcacccggctcccccgccacctgcggggccacctccgcacactcccggcgcgcaggccgcggctcctcggagttgaggtgctggggcttggcctgcttgcgccgcgacatggcgcgaggaccgggctccccgcgcgtccctaggagtggcctacttcacacaacgaattcccggagttcggaaattaccccccttcggccggaacgcgcatgtcccggcaattctgctcatcagccgagcagggcg

SEQ ID NO: 632 - DNA, 6511 bp, Homo sapiens
gcgaccccgggggctagcagagaggagaggctgcgggaggactcgctgcgaagggcgaggggtggcgctgggtgggacgggcgcctggggccgtgcagggtggctcctgggtgctgcccgggctgcctgtcgcccagtactggcgcaggaagacgggtccgcgcagcgtctggcaacagtggcctgctccacgcctggaggcgaccaagttctgagttaaaggcgccgggcttagccgggaagtgtatggcgacccagaacacggagcggagaaggcctcaggggacacgaggctaccgccttagtcctcgggcctgcgctccgagcggttagggtgcgtacggatgggctccgggatgttagtggagaggtgacaggagtctaccatcccacggccaagcgtgtgaggcctccggcgggcgggggtcccccccggggcagggcagggggagagtcaggcatgtctctaacgggctccctagtagaaccgctaggaaagtggccttcaaccctaggcacctttgtggctttcaggtagttgggcgactaaaaattcacttttgcctgctgtgaaatgggacaggtggttgtcaggttagagactgtgcccacgaagtctcgtttggcgggccgggactgacgtggacccgggccctcctcggaagcttgggaacctgtgagcccctcagctcctcgcctcactttgcctgtttgaaaaaaggagttgtttgagaggaagagttaaggctcaaaaggttctaaacgaagagcatgcggcctgacgcggagcgcaaagaagcgagcagtgaactgaatctggtgggactgagaccagaggcgtctgtatgcggcggccgcttcgcgccctattaaagcaatctgttatttacgataatcatttttgtaattattttggagtggctgtgacttgatgtctgtggtgccccagggcatgcccttactggacatagatacttcagggtgccctttgacgccagtgtcggtccagtgggtgccagtgccgcgaagggagggtggcgggcgtgaatgccccctcctcctgggtttgccgcaggccccggcctttccaccttgcttgatcctggcgggtctgccacttactgaggtccctaccggcgctcacgttgtcccgagaggcgggacaaacgtccggcgcgtggcgcggagtctgcgaaagcgctcgggggcctccatcttctgctcgggagtcccctccctggggcgggaagaggagtcgcagatctgcccgaatcttgctctacccgcctggccgccttcttccgtctggggtgggggcaggggtggcggatgactcaggcctggggccgggagccctgtttccaaaggcaccacctcgcgcctctttggaagtggcgcgctgttggggcgctcccgctgttgcagaggcctggtttgcggtttcataggggcgtgggtccagggcttccagggagtaagtgagtttaggctccctagggggcggtagaggggaacccccgacaaccttccatcctcttctccaggcggctgcgaggcctccggggttccagaggggtccccttctgccggtgccggctgtcttgagcgcggccacgcagtccgcgtcttcacgtgggcaaggggcggggacgttggagggaggctgtcttggatgctggagccttcggttcccggctctgctgagcagaaaagttgaagtcaaggaagggttgaggcttcctcacaagggcgcgcgcgtgcctgggtgccggcccagaagccgagaatgtgcgtattggggaagggtctcccgtgccgagaagacagaggatttgttctagctgccttccgtacagagggcgcggaggttgcgctccagttcgaacgcttacccattggaaagagggcagcgccggggtccagggaagctccttgggaatgaatggcctttgccaagcggttccggatcctctgggtcctttgggcccacggcacggtgctgcgcgagccctcagtgcccatcggctcccttcgcctcctgcgtagacgctcccaggcggggaggcatatcggttcctccgggcagctttggctagtgttgctgtgggaaaggagagccagggcctgggatgggggatgagcaccttcttgcccattccgggccccagcgtgcaggaggtaaacttgccagcacagacaagacagcttgttcaagctgcacctcaggccgggtcagagaataaaaccgagggctagaaggcccagaatgtcggacagcccagcggcacccgtcagggagtcccaggcgcccgaaagaggcgccgcacctctggcgagtctaggacccatcttcctggacctgtgctctggagtgcctgcgggcctgggtctaatttctgcttctggcaggtgtccccctcccccgccgctaataccaggagcgctgcttctgcggtaacttattttacccccagaagcctgttttgggaccgaagtgtcagggtcctgtgtgtctttttatgcactgttctccttagtgcaaagccctgcagatatgcttggccgaaaagtctcagtggtttcaacttccagattttgttcccgcgtccggtcggaaaatcacctgggatttggctgctgtctaaggccgggggaaagtttcccttggaggacgcctattattattattttcttttaggcccacctgggtctaaataaatgctaaagttcaaacgaacccgagaaggaacagcgaggcagtggatgccgccattccgtggatgggagagtcatgtctactgcaggtgcggacaccgtactgataggcattgattattgcaaaatcgtattcagtatcaaatagaaatagtcttgtcctctaatccccacagaatgtttaaatccagcccagggagccagttggggcgtcccaacaaatacgccctcgagaattagcgatgttccccttacaatgaaagtcaattgctgcataataactgggccaaagaatttcgttagtttaaattttaaaaattagtattgcactttgctttcaagtttgggtggcaagtaccgaaggggagagggaagcagcgtttgtgtggaaggaagtttcgttttctgtctaaacatgtgggacctgggtgtctacctctccagtcgagagctctctgcaggctctctcccaacttcctgcacctcctcaccctcaccttacccgtggcgctcgggttttattcctgcccggcgcttctttcccagggcgagtagaggcttctgagtgaccggcccgccagaggcagctgcagagccggcgttccgcagggcagggcagggccgggccgctgggctggtccagtgcgcgcgggttccccctggcctcagccagccgcgggagatgccacttcgggcgacagcggcgagacgccgctgtccgcaactcctgggcgggtaggaccgtctgctgcctctgcggcccttggggcagactccccaggagtcccttcctctctcctcccgcccgggggccgggaccgcgctgtgcccacggagggaactgggcgtctctggcgcactggggctccagctgcatgatcccagctcagaccttaagcctcagtggggtgtaggtgggatgggatgtgtttttaggagatgaggagaccccggttgttgagtcgctccccaaatgcgcagtttcttaactccaggtgacatccgtcttttggaggaacgagtgaaggccgtttaggcgaaagaggggtgggtttcagtatttggatcccttcccccagctctgccaatctcaggtgtgtttacggtggaggtgacagaaggaaggcgcgtcgggggacccaggcctcgcaggtcttcggctgtcaacgaggcaccgcccactgactccgcgcttcgtccctcacagcgtggggctcggcgctgcgccaggcccgggtgcggggcggagctaggctgggactggctgggggccgccccgcccggcgcctgggcctccgcgccggcccccggggaggagttatgataatttccttctcattaaggcgctcgggtcccccggctatcgccaggacacactgttcgggcgcggctttccccgtccgcggagcggtcttgacactcgcggcggcagcatctacgctcgcagagccgccgatgcgtgtccagtgacccggacagcaaggcccgcgcgcggcgggggcggcggcagacgcctggtcaccgtgaccccgattttggatttaccgcttgggggctggggggatcctggatttaactggcgactgttttgggggacgccggacgccatgttgtggaaaataaccgataatgtcaagtacgaagaggactgcgaggtgagctggggctccggggtgcagccccgccccgccgaggacagtccgggaggcaggggccactggaccgaggtcggggacgagggcataggagccctggcctctcggtgggacgggatccacttctccggacaccccttagtccatttctgcggggcccctttcctgtatagggccttttcctaaatagcctcccctcgggaacgaggcctggaaagagaatggcaaatcccacccacacagcttaccgggcgctttcctaagcggcaaacagccctgcttcccgttttctcggaaaagtgccccgtctgcaaccctcagacgtggcttttacgcacgaagtctctgtccaaaggggtcagatgaggctacctgctagcgacaccttggcggacactcctccaaggccggcttgtcacctgccccgctacctcctcggggaagcacgaaaacaaccgaagtttggctttcaaaagaagtgggggctggggagtggtggtgggggtgcccgaggccagatggggccgtaagagctcgcgagtgctccagcctgtcggacaggttgagctagagtttcggagagtgggagggaagaaggaggcggcgagcgggaagaggaagaagacgcaggcagcgctaggcgagctcaggggcgccgggagcgcggagctcgggctacggactcgcgggagttcactgcgcctccgggccctggagggctgcccctgcccgcaggcccgggcgcttccgccaggaggcgacagcgccatgttcctccaggttcccggcgccccgagacccctgggcagatggggacgcatcctttagaaactgagtcgggccgcccaggggcgagggaacgtgcgcgggcaaggctgcccaatttccagggttcttcatgccccctctgcgccccgacgtgcgagaacactgcccttggcagtgcagggcgcccccacttattactcccctcggctgggcccggccagcagggagggccgccctgtgcgcgcgctccctcttcacttcccagggcggcgcagggtggcgggccctgctttccgagcgccgcccgctcggaggtctttgtcccgagggcgtggaagggagggtcccgggggcgggggaggtgcgcatttcccgcgccgcgcactctatccgcgcctgccgcgctgccacctccagcagtccctgcgtcatgggcgggctccacgagatagctctgcaccgggcgtccggctccttcgccccgggctctggctccttcgccccgggctccggccacggacttttctggcccaagacccagggttcggacttggcgcctccaagcgcctcgggcttgggagcagcgcctagaccttcgccgccgggctttgagaactcgttcccccaggtctttcaccagactctcctccctccccgcactctttgcttacaacgaaatcctcggggcgcattgcccccgggtaccttccgaccctgggcaagccccgccgggcggggtgcggttggtcccccggggccctctgcgtagcccggcgatgccggccagttcgcagtagcggggtttcgcactaacggggtctcctgtttttttttttccctccaggatcgccacgacgggagcagcaatgggaatccgcgggtcccccacctctcctccgccgggcagcacctctacagccccgcgccacccctctcccacactggagtcgccgaatatcagccgccaccctactttccccctccctaccagcagctggcctactcccagtcggccgacccctactcgcatctgggggaagcgtacgccgccgccatcaaccccctgcaccagccggcgcccacaggcagccagcagcaggcctggcccggccgccagagccaggagggagcggggctgccctcgcaccacgggcgcccggccggcctactgccccacctctccgggctggaggcgggcgcggtgagcgcccgcagggatgcctaccgccgctccgacctgctgctgccccacgcacacgccctggatgccgcgggcctggccgagaacctggggctccacgacatgcctcaccagatggacgaggtgcaggtgagcggcgctgcggctcctgaccggacctgttcaccctacg

SEQ ID NO: 633 - DNA, 1560 bp, Homo sapiens
acgccttgcagtgccgggtcctgcggcgaccactgagccccttcgtcctcgccctcagtcccttcgtcctcgtcttcggtctccgctttcccagtcggccggggctcgtcgtccacgaccccgcacgtgccgccgacgtcgccctgccgattccgccgcaggaggtggaactgtagtggtgccggcggcttctcccctggggcggcggtggcgaggcgctcgctggcggcgggcagcggctggatgaaatacgcctcccccagcaggtagaaggcgccgcgcacgccctcgcagaggctgagggcggcagccgagctgggatcgccattcacggtgccggagtagaagcagtgcgccaggtcggtttccggaagcggcgtctcggacccggatttgcgccccacgttctggagcgtgaagccgggcgccaaaaagctgctgtcgggccgcagctccagatccagctgctggtcaaaggcgtgcaggcggaggcgcgtggtcccgtgtcccggggcgcgctccagctccggcaccactagctcctcgtcctcctcggaggggcgcccgagtgcgtccgacacggccagtagcgccgcggcgagcagcagcagcgtgggtactggcccaaagctccgagaccccggagcccgctccgcgttccccatgtcgctgcccagcttgcgccttccgaacccctcgggcacagctcgctgcattggagccccaggagacaccgctcgtagcagcgcacggagcgagggacctttagttcgggtcgggagagcaaagcctcgttggcctgctctggattgttaaaattaacaatttctattattcgttggaagggcgcgcagagccggctacagccgaagctcccggagtcactaaaaggaggcgctgcagttctgccggcgcgcgggaagtttttcttccagcgcaaagttggagacactgagaggcaggcgcaggcagagtggctctgctgggacaagaagcgctctggggcgcctccggggctgaggcaacgcggagattggtgcctggcgcccctcttcggcctccgccttggctgcgatgttgctcactctgctcagggctctcccctctccgtccggtagcgcaccctggctttgcaatagcccctggctcggagccgctttccagcgagtgcaagaaccgggcagccgagcggtccttttatagtggaccagtgaaacccccacccccaccccactcctcccctttggcccttttccatcccaaagacgccgcccccggctccgttggtgctaaaccgcgctccgcgctgcgggctcgggagggggagggggcagcctccgcgctggctccacgccactgctcgtcaatctaggggcggaaggggcgctgtgaccagcactttgtactgctggggccgctccagggagaagactctcccttccaccgcttttctccctcgccggtttcctggaccacccttcctccccaccgcccggttgcggtaactcagttaccgcgctgggctgcggttcccaggagggagggttcggttggagaacg

SEQ ID NO: 634 - DNA, 572 bp, Homo sapiens
ccggtctcgggatcggtgcctctcgaagtctttccgaccccgggagcggctcctccagcacccggcgcccgccattactgcgccccgcgcgccggcccggcccccgctggcctcgtggcaagaacgggggcgtcccgagccgggctcctccccgcggggccgggccatataaggaaaagctaggcccgctccgcccgccctgcgccccagcgtctggccgatttggggacgcgggcagtcgcttccggccccggctcccgcacattcttgaggattgggccggggatgggaggaatggggacgcctggggacttgcacgccgcgtgcccctccaccacccgccgggacgccctctgcctcggtcccgagttcgagttcgacctccgccactcagctgggtgtcctggggaccttggtttcttccctttagatccggacactgaagcaggcggtagcgggtgtcttcctacctggctaccccttcggcgcctagcgcgaggcagggtgggcgaggcgagggcggcgccctgcgagggagggcggtcgcagaacctgcgggccttcagcgcccc

SEQ ID NO: 635 - DNA, 1021 bp, Homo sapiens
gcggcgccacgaggccgagaaccggcgcttagcctcatccctgtggctgcagagtgccaagccccaggtcctgcgctcagggcaggggtcaagagcagctggcaagggcggcgcagcctgtggggcccttgggcgcggcgggccgcagctccgggaagccacgtcagcccaccggcgctgcagctgcagccgccaccagcacacggaccaggggtcgccgaggattgggaatccccgaccaggactgcgcctccagccgtgcggaccccggggccagcggggcagcggcaagtcaggcagtctgcagcaggagcgctgggcatgggcttcggcccgggttgcaggaggcgtgcaccctccggccggataggcggcgcactcagggaccaggaggccatcccaggtgagccccgccagccccagccggagcccgagctgcagctgccacctgcaagtggtgctctggctgcagcggtggcaaccccggatccagtccttccgcctcgcgcccatcagcgcggacccgggggcgacgcagtggcgaagtcgggctgtgggcccggcggcggcaccaggcggagaagcgccactcaaccccatccctgggctgcagagggcccagcgcggagggctccgcgcgtcgggagccggtggaagaggagaagagcgcgcgggcgacagtcatacaggccttggggcagggcgcgcctcgcgctccagggagccacgccagcccgctgcgcctccgcagcaaccgccgcctgcacgtggcggggcgagagagctgctagggcggtttctccgcctcgggcctgttgggcggggccggctaaggtgcgcgtgctcgctggtcctaacggttctgttgggcgtttctgctgagaggcgggaggggctgagagtctgtgcgaaggtaggtggacagactgcattgcttgttgttgcgcttcggaggcggcgatccccgaaggcgagctgaaatacggctggagcgttcccaggctacagtttgtagccgacg

SEQ ID NO: 636 - DNA, 1281 bp, Homo sapiens
tcgaaagcccaaagcctcgggcccaccggccagctccccaccccgctgctgggccggacaggtgtaggggaggcggacccgccccgcagccgactcacccagctccagggcctggtcgcacctgagcagcgcggcctccggctgctgctggcgctgcaggctccgcgcctggcctgccagcctgcgcagccggcactcggccgggaagcacttctccagcaggccgctcagcaccacgttcacgcgccgcacctgcggccgcgcgggccctggctccacgcagcgcttgcagactgtgagcccgcagggcagcgtcaccggcttatgcagcagccgccggcagcgcgggcagccgagcaggtcgcggggcgcgcggggctccggggccggccctccctcgccgggcgcctcgggctcgccgcccgggttctccgcggacagcggccggtcgcgcaggcccacggcgcgcaccaggccgcccgccagctcttccagctcctccggccgcagcgccccgagccgcgcggcgccgcggaacgcgcccagggcttcggggaggcggccggcgcgggccagcgcgtcccccagcctcaggcacaggccgcggtccggctgcgccagcccggctagcatggagcgaaagagctcggctgccatctcgtagtcgcccgcgcggaaggcctcgtcgccctcctctaagcgctgggcgatcggctccgcgcggtcgcagccaggacactggggcggcggcggcggcgggaccggctcggggctcatcaccgcggggctgcgacgacgcgggtccggagcgaaggcgcggagcagggaggatgcgctgctgctgggaactggccggcgggagcgcggtctcagccctcgccagcagccacgcgcgtctgggggcggcgcgctgcgagcggctgagaccgcgggcgggggcgggcgcctggcttgggcagcgtcctcagcgcggtgtgggcggcgagccccgcagggctgcaatcgttccggggtgggggccgggacaggcaccgcgggcgcaatctgagcccctgcccacgcgcagcggcctctcagtcccgccggcttaggtaacccaggtcgctgcggtaacgcagtgaccgcgctccaggtccgcgtctcttgcgatgcttcccccactcgcctgagggctcctgcgcgactgcgcgcgcgtcctctgcctgccgcctccccgcagaggtgccggggccctgggagcaggtggccttggccgcgggctgctggcgcgccggcaccgcg

SEQ ID NO: 637 - DNA, 2029 bp, Homo sapiens
tcggaaggcgcagctacaggacgcccgctgccccggatcggaaggcgcagcacctcaggccacaatctcagacacgccctcgggtcccgacaggtgttgcccgcctcccacggggctccgggaccccggtccccgggctgccccctgccttctggggcgctggagcgcgcgcagtggcggagctggagccacccagtgcttcgcacgggcgcgctccgcttctccgggttttagcggaagcctgcggggggcggggtaaccgcggaagccggcggccgtgggcgcgcgggttgggggctctcgcgccgctccgggctctccccccccccggctgcggttgccgaagagaggccggagcgcggcgcccggctgctccacctggcgcgctgagcaccgcgcggggagcccccgggggcgggcggtggggggcgcggactgcgggaagaaggcacgaggcgtcgccgcagctcggtcaggggccggggccccgccgctcgccgctgcactaacttgccgcttggtctcgcctcgccgccgcggctcgctgcgctttgggtggcggggggcggggagagcggggagtcagagggtctgcggtggccgagggagggaccctacgacggggagcccgcccggtgccgctcttcttcccctccccgcccctccgctccccccaccccgtcccttccgccgattccgggagcgacgggcgcccgtgacctgcgaacgctgccaagtgacggtccccgagtctgaagcgcccgcgaggaagcgagcgccagcgcgggccgccggcgatgacggccgcgaagcaggagccgcagcccaccccgggggccagggcgagccaggcgcagccggcggaccaggtgagagtcggcagccgcggccaggccctcccgggaggggtggctccagtgcgcgctccgcccgcctcccgcttcccaggctgggctcccgcgcctccctcttctcaccctcccccgccccgccccagttccaggctctcctgcttctccacggactctgcgggaagttagagcctctgcgtgcgctccggggcccggcgagaggatgcgcaaggtggagagccgcggggaagggggcagagaggtaaaggctgaaggtgccccggggaaccccggcgggcggcccaccgagggagggagaggcggccgggaccaaggaatggggcctcttggttccccattaacgcacgctgaagaaatctgctgcgctcctgacggccgctcaccgggttcgagccccgtcctcctatagccggggcgctcgctggccaaagcgacccgagcaggcgaatgacctttaggcggacggggttttccctctgctttcttgtttcttttgaggagacgggtgtgtgtttgtgaggtggggatgggggaagagtgtcccagacatccgtagtctgctgagcggaacggagcttggggagcggcgaggcattaacgattaagtggagccgggaaggcgctggctttggtgatgtgttgggtttggatgtgtcgcgtctgcacagatgaggtgccctgcgtgggctgagggttattcctgtctctttcccgtccgtctacacccgccaacccctttttgttttggtctttagaaatctgtagcataaccgtaccgtcgtggatccccatctcgtctctgtccctgatctggggtgattgggacttcggtgtcgctctttttccaaagttggagggtcgggagcgccgagacaccctggcgaggaggaggaggaggaggagggaggctgcgctgagccgggtgcaggtgcgctcacgtttgcatcaattaggaactccgggcagagagagctgcacttaggtcagggattaactgtggacccgcgggacccaagcgctggggtaggaggactggggatctttgttcggagtgcgctgcgaaggctgctggaggcggacaccctcccagcttattgctagcgtgggatagagggagcgcacgcggctaggctccagcagcgactcggcttttcgcg

SEQ ID NO: 638 - DNA, 1793 bp, Homo sapiens
gcgctcgcggtaagggctgtggccgggcctgtcttaggaactctgggccctgactcggcccgcgggtaggtcccggaaggagctgcgcgagaaggggccgccgcgggtgctggagccgctgaaggacgtggtgctgatcgaaggcagcgcggccaagctcacttgccgcatttcggctttcccggacccattcatccgctggagtaaggacggcaaggagctacgtgacggtcccaagtaccgctacgtcttcgaggaccctgacgtggtggcactggtggtgcgcgacggcgagctggcagacctgggccagtacagcatcaacgtcaccaaccccttcggccagtgctccgactcggcgcgcatcctcgtggaaggtacgcgcgccccgggcgcagcgccagggcgcagaccagcaccactcagccagagcccgcagcccggtccagctgcgcgtgtttacctctgggcctagctacagggtccccgccagcccagctctgggcacggcctggggcgcatcgccgcgccagccaagtgcgtccttccctacctcgggatccagctccacccgggctgagcagtcagctgtggacttccatcacgcggctccgggtccccaaggtcacacagcaagccagaggcagagccagggttggacccgggtcttctggctcccaactctggcaatttccactacccggagcggtctctgaggcaccgcgagatgtgtgaacattcaggggctttcgcccgccttatctctcttgatcctctattcgaccccgagaagtaggagaggcagggataagtccctttaacagccaaggagatgaaaccagagaggctaatgatttgctcaacgtcacactgcgagtttaaatgcatctgtatttagtgccgggtattagccggtgaggtgatgccctgcctcatctccgggtccttcacggggtttcgctcccctttccttccgctagtcccgacgaagattcaaaagggacccgacaacactaaggcgcgcaaaggcaccaccgtgacgctgactgcggagatcctgggagagcctgcgcccgacgtaggctggaccaaggacggggaggacatcgaggaggatgacaggcgagggccgggacctgcggcacggccagggcctggggctggaacctgggtgggactgagcccagaaatctggctggagtgacgggggcggggactgggcagcgaggaacagagctggctaaggagccccgcccagtgcgcccgtgtactgaccacggctccgccctcctccccgccgcccttccgcagggtgttcttcgagatcggcagcaccaccacgacgctgaccattcgccgggccacgcctcaggacagcggcaagtacgaggtgtacgtggagaacagcctgggcatggaccagagcttcgctcgcgtcgacgtggcctgaacggcacccccggaccttccgccctggcgccgagcccgggggtggtgggacccacagccctccaccagcttgcttaataaagctgctctctgaccctccgcgtctgtcctgctcttccgcgtcgccattccctctcccccgcaccagcgcccacacgtattccagacccccacgccaaggtcacagcctgttggagtcacagggaggtctggagagcgcctagcgccgtgctgcatttcagacagtcaaactgataagagttgccctcgccgtccaaggcgccctcacttcccagcggtaccgccggctgggcctgggactccgccttctccgcttttgagcg

SEQ ID NO: 639 - DNA, 2697 bp, Homo sapiens
tcgcggagacgtcaacccagcccgccggcgcgcctctccctcctggccctcactgcctgccagagggctgggaaattgcggctcccgcggctcctctaaacaccgcaattaccccagggaaattacttgcgccctcctcccgcgctctgcctctgtgcgctcccctcccctcccctctcctgctcgtctcttccctcctctcctctcacgcacccgcctcccgcgcgcagggacccctgggcaaggccactgcgccccggatccgcggccgctggcagggcgctcagggggcgcactcacgcggatgacgtagcgcgaggagttcctgtcgtccaggctgaccgtgagcgagaagagcgcggcggcgctgtacacgccctgcgccttgtacagcagccggttgaggtcccatcgcgccgcgacccccggacgctcctccgcgccgcccaggtcccagcccccgcagtcctcgatgacctctagcatgggtcgcgggcccagtcgctcgatctcgcgcatgtcgaggcacgagcggaagaaggcgcgcaccttgcgctgggccgcgccgccaggcccacccccgggccgcgccagcaggcgccgtaggcgctcctcgttttgctcgccgatggccgcgatggtgccataggtgagcttgtcgtcggggatggcgtggcgccgcagccaaccgccgcaggcgaacgagtagaagtcctggcatgggtcgatgctggcgtccaggttggcggccaggaagcgagcggcgcgcgcgaaggccttgcgctcagggcagccctcgggacaggcgccgccgccggccgcgaccgggcccaggtacttgagggccagcatagccgccagaatggcgcagaggccggcggcgaacaccagccccgacagcaggcacacctcgcgccggttccagcgcggcagcccggaccgggccccggtggcgctgcgcgcagcgcccaacgggaagcccgggggcagggaggccccgcgcgcgccccccgcgccgcagcggctcacgtacttgacctcttggaactcatcgtagtgcgccgtcagcgaatacgggggctccatggcgccgaggccgccgcggtgcagacctgggccacctgggctacgggatgcgcgtggccgccggcctcctcgtgggcctccgcatggccctggggccgcagctgcgggaagggcggaagcaggctcaggaggcgccgcagccggatggggctcagggtcaccgcgaggagggacacaggcctgggtgcagaggccccagccgcgggcctcattcactgcggaaaccagggactatgagggttcggcggggccaccacccccgggtgcacagtggagtcttcccccctgtcccctccctgcacacacttgagggccgcagggttgggagggctcttattggaagcaagaggcgccaggcaaggggcctggcacgtagtgggccttcattgaaaggtcgtccctcttccccttcgcctttctcttccacgacctgccccagccaaggccgggtggagtgggggaagaagcggaggctggagtgaggaggtgcggtcaggggcgcgtctatgcgacactttcagctctccgcgctggacccagacagacgctccgcaaagcggccaaagaaccaaactttgtcctcgcggaagtccgcgggatcgaccacgccaaccccgctccctggctccttctgctcggtggcccgacggcccactcgccccttccctaggggcgcgcgccaacgccccagggtggcggacacacaacccacccactggacggccctgatggagaacccgagacgggttccctccccccactcccaccatctctgtccccgccccgagccactcctggcttcaacaggttctccccagaacccaaacttgggcgaagtttcacccccggcggggagcgagctggctggcgacccccgagccccggcgccgtgcggcgcagtccgcggagcccgagagccgagcccgggagccgcagccgcagccgcagccggagccgcagccgagaggacgcagacaaagccgggaggctccgcgcagtggcggcggcggcgacggaagtggccgcggtggtggcctcagcggcagggactcgggcgccacttacccggcaggtgcgcgcccgagccggcggtgaccgagcgggtcgggcccgagcgggggcctgagccgcagcgcagccgagcgggcgtccggtgtctcccagcgcccgccgcctcctctgccgccgcgccgagcccgccgcgccgcccgcctgccggcccgagggagggggcgcgccggcggctccaccctcctccgcccgccccgcgcgcccctccttcctcctgcatctctcgggccacctggcagtggggcggcagcgcggacgtgggtcggcggccgcggagacaggctcccgggggtcgtgcgcgggctgcggtcggggactccgggtccagccgcgttccgagacgagtgagggcagcgagtactcccgtgaagggtcccctccgatccagtgtccccactcccagccgcccaccagccggctggaaaggggctggagctggagatgaggagccgaggactcctccgaagggctgggggcggtgtcagtagtgcctgtgtctgccggcacagtccctggcgcagagcgcaccttcactaaccg

SEQ ID NO: 640 - DNA, 1384 bp, Homo sapiens
gcgggagcaccagcggcccacgccgaggaagataggcgctccctcctggggtgggcagcgcaggtctggcctgcgggtggggggtggagagtgagaggcacgcggggcaccagctcagctcccctctggggatttcgtactcgcagtttaaggaaccggtggagcacgaactccactcctgagctggcgcaagcgtctcccttccatggagatccaccccggctcccctctgaggccccctttccaagcaccctctcttccgagcacccagcacctccccaaccttagcacggctcggggcaccagttctccagggcgggggctgccccaccgctcaagggaggggacagagggccggcctcggtccaggcgacccctgcccctcgccaggggcgccaccttggccccctcccgactgccgtccgccgcctccgcccccccggggggtgtgtctccgaagtacgggggcgcgggaggccaagggtgcccccagcctccgaccgagaccccctcccgagccggcggcgaatggtaggctccatttaaagagtgcctggtggcgcgcggtgtccttcttggagcagctctcggcgcccgcccgccggggtctcggcgatcgctgctcctcctcctccttctcctcctcttttttctcctccgcctcctccccccgccgcctcgccaccgccgcggctagggctggaggcgccgctgtcattcctgtgccggaggaaccggcgctgccggtgcctgggggtcggggcgcgggcgaagccgggccgcggaggacacaacaggtagagccgggggtgcccggccgcgcgccccccgcgcatcatgcagctctttgtcacctctctcgcccccaggccaaaatcctgagcatgatggaagacaataagcagctcgcgctccgcatcgatggggcggtccagtcggccagccaggaggtgaccaacctgcgagccgaactcacggccaccaaccggagactggcggaactgagcggcggcggcggccccggcccgggcccgggagccgcggccagcgcctcggcggcgggggactcggcggcgacgaacatggagaacccccagcttggagcgcaaggtaggatcgccccggcgcccagggcggaggaaggcgagcagagcacgcccggcctcggaggtggccggggacccggggtcccccacacccggggcgaaatcgctttgcattctggcttgtaaccctttccgcccggcggtggccaccgctgctctccggctgggagttgcaggctgctgtcattcacgaaaacccgagcgcagtgtgcacggggtcacacggtcacaccggccccggccagcctgagcgaggcgcagccggcgggtcccttccg

SEQ ID NO: 641 - DNA, 421 bp, Homo sapiens
ccgcgttcaccaggcccaggcctgggccaggcgctgtcctggcggcgtcagggaggacatcgtgcccagagctcggacccagcagcccggccccgcgccctccctgtcccgcggcccgcaggcccagccctcaagcgcccagcctccgcggcctttgtggcgtcacagccagcctgaagaatggttgccttggagacgtaaacccaagagccctgctcctggagctgagaactgcagcgcggaggcttcggagcgagccggggcagtcggggtcggtgggtgcgctcgcggtccggggagagggggcgcgcggggtccgtgagggcgcgtgggggcggcggcaggggtgcgaaaccagggcccgaggggcgcgcgtggccgggagcggacttgcaaggcgccttccaaggctgcccgctcg

SEQ ID NO: 642 - DNA, 2606 bp, Homo sapiens
ccggtctccccgctccctcgaccaatggctgtcacgcggtccctttaagaaaccaggaatccgcccggagtcggagcccaaaacagatcctcttctctgctcctcccctgtccccgcgcggcgaatggttcgcgccggcctatatttacccgagatcttcctcccggacggcaaggatgtgaggcaggcgagccggacgccgctcgcagcaccggagagggcgcactgcaaaggcgggcagcagaccgtggagagcccgggagcggagctggacaccgcctcggagggaagaaatgaggtagcggcggttcccggacccggccatgcccgtcccctgttctcggagcccagcgccgtctcggccaggccagcccggacactgagcgggccgagcgcgagtccccggcgtccggcggagcgaagatgcagtgagtccccgcgggactgctgcgcggggcccgccgcggccagccggacccagcatccgaccgcactttgggcgagctgctgacttgagaccagcccaaacggggggctttccatctccagcacccctcggaggtggggagcaccggcccctaggcacactcgctgtagagtttccgcgggttttggccccagtcctgagggttgtgtgtgttaggggacccacctcacgttcgccgaggagttcctgcatattcttgcaccatcccgggtgctgttgctggggctctctttatttgcacgcgcgcttctagcttttttcctgacattttccactctacgctcgttctttctcccttgcattttgttgcttgcctgagactctttgctctcgcccttgcccaggctggggtaattctgtgtgcgcgcgtgtctcccccgcaccaaccttttttgcacactcgaagctgaatattttcttttttagagaatttacccgcacctcctgcggggttcctaagcactctctctgctcccctccccccaactccctaccacagggccgctcccagtagttttattcttcgatcttgcccgggccgagcctggcaggggccggtggctcagcgggcctcgcacccggcgctccgccgccgccgccgcccagctgcgccggggcgccctccggagatgctgccgtggaagaagcacaagttcgagctgctggccgaggcgccgccgcggcaggcgtccaagcccaagggctacgctgtgagcctgcactactcggcgctcagctcgctggcgcgggcgtgccccgaaggcgcgcttagccgggtgggcagcatgttccgctccaagcgcaagaagctgcacatcactagcgaggacccaacttacaccgtgctctacctgggcaatgccaccaccatccaggcgcgcggcgacggctgcaccgaccttgctgtgggcaagatctggagcaagagcgaggcgggccgtcagggcaccaagatgaagctgacggtgagtgcgcagggtatccgcatggtgcacgccgaggagcgcgcgctgcgccgcccgggccacctctacctgctgcaccgcgtcacctactgcgtggccgacgcgcggctgcccaaggtcttcgcctgggtgtaccggcacgagctgaagcacaaggccgtgatgctgcgctgccacgccgtgctggtgtccaagcccgaaaaggcgcaggccatggccctgctgctctaccagacgtcggccaacgcgctggcggaatttaaacgcctcaagcggcgggacgacgcgcgtcaccagcagcaggagctggtgggcgcacacaccatcccgctagtgccgctgcgcaagctgctcctacacggaccctgctgctataaaccgccggtggagcgcagccgcagcgcgcccaagcttggctccatcaccgaggacctgctcggcgaacagctggagcaggagctgcaggaggaagaggaagaggagcaacccgagggctgcccggaggaggaggagaaccgtgcggcagagggagatccagcagaggaggaggccgaggcgcagcgtgcgctagtggtcgccatgcactttgagtgcggggacttgttggatactctggagaatggccgtggggaggcgctaggaggcggcgggggctccctgggcccgggggccgggccgccgcctctgctgctgggcagcgcctccgacatgaaggctgagctgtcgcaacttattagcgacctgggcgagctcagcttcggcaacgacgtgcgcaccctgcaggccgacttgcgggtgacgcgcctgctgtcaggcgacagcacgggcagcgagagctccatcgagggcgggggccctgacgccacctccgccaccgccggggactcgtcccgccaggccgacggcgccagtgcagacgagccccactcgggctgagctcctccgcgcgtcgccggcgctccaccgtggctacccatccgtggtcccgacaacctccctgtcccttgcccgcccccaggaagggggaaatggggcatttggggcccagacctacacttggagcccaggtccagcgttcccccgaccgctttcccctacctcccggcccccgctcccgccccagcacttttggctctgttgcgcgtggggatgcg

SEQ ID NO: 643 - DNA, 1094 bp, Homo sapiens
gcggcggactacgatcctttcctgctcttcagcgccaacctgaagcgggagctggctggggagcagccgtaccgccgcgctctgcgtgagtcgaggctgcccggctcgcgggcgcccgggacgcggggaaggtgggactctgtgcggggggcagagggctcgcggacatctcggggaaggggctggccggaaccgccaggggcgcggtccccttagctaaggatcggtccgcggaggcgcgccaggagcgggagagggtggcgcgcccggggcgcaggaacccagcgcagcctaggctggaagtcggggcgctgggcactacagagcccgggaatggggcgcgcggagagcggccgcccgaggacggcgctgcggcggctgcagcccgggacttattgccccatgccctcctcccccagggtgcctggacatgctgagcctccagggccagttcaccttcaccgccgaccggccgcagctgcactgcgcagccttcttcatcagcgagcccgaggagttcattaccatccactacgaccaggtctccatcgactgtcagggcggcgacttcctgaaggtgaggcgcccacggccagccaacctagccggagggcggcacgggagggttggaaagggctggggcgctgcacccagcgtggggctgctgagcgtaggtagccagtggcacttcttagacacttcgctggtgcccgagtcggagaggcgcgttcgaggacccccacacggcgagaatctcgcccttacccgaagacctcgacccacacacatccagtggggctggggccggtgcctctggacgctgccatggtttaaattcccttctgggcgctttcgaggccctaggaacttctaaagacttgaactcgcagcgcggaactctgacgcaatccagggccgaggaaaaatgattaaaacccaacaagctcgagtgctggggtccaccaagcgggccgtcttggttagaaggcccgccccacacgtctcacatctgagcccgcctcgctcctgctggtccacgctcggcagagccgttccgagagcacagaggctgtcttcagtgcgcgggtgacccg

SEQ ID NO: 644 - DNA, 2168 bp, Homo sapiens
tcgcgctgcagtcaggcagagccccggggcagctcgctcaccgcggaggagccactttggagttttacgccctttccacaccccacccatggactggaaaggatgttcagttactcgcgagcttgtctgatactgggatggaaagtcacagtccgcaggctggagtgaggcgcgggaagatgcctggtccttgcctcgcggacttggcagccgcgtcctgcgggtctgtccactgaactgctgaggactcgcccgtgtgcggggacccgagtgccacttcccggagcgttaccttgcgctccagcctccaggctagataatacctggaaggcagggcagggctgttcccgctctcaccccttgcggaaggatggcaggatccggcgcagcgacgtagcagcgggagggcacagcgacctgcatctccagtttctcctcaggacacaaggctgacttcaccttccggacagctgcaaagcccctgccagaaccaaaccgaactcgcgcctcggagaggggcttctggggccgtttcgctgcagggcgtggggagtggagagagggaaggggaagcctggggctgggtgtgcgcgcgtgggagcgcgcctcggagcgccccgcactcccccactctatccccgggggcagtttgggaaggagggagtggtagtcgcgggaatgagggagcaagagaaaccctctcaaagtgacgccccaaacaggtccggatttagaattcgaagctaaaggctgttagaaattgggactcctcggcctcctctgcagcccctcctttcccgccccgaagcccgggcggtttgctggctgcctgcttccccgcccccggctcagaggtctctggctggcgggcgccccgtcggccgccggcttcctccttgaaacccgccggcgcacatgaggccgctgcccccgccgcaggcgctggcggccccctcgcggtgcccgtggtgatgccatgccccgccaccacgcgggaggagaggagggcggcgccgccgggctctgggtgaagagcggcgcagcggcggcggcggcgggcggggggcgcttgggcagcggcatgaaggatgtggagtccggccggggcagggtgctgctgaactcggcagccgccaggggcgacggcctgctactgctgggcacccgcgcggccacgctcggtggcggcggcggtggcctgagggagagccgccggggcaagcagggggcccggatgagcctgctggggaagccgctctcttacacgagtagccagagctgccggcgcaacgtcaagtaccggcgggtgcagaactacctgtacaacgtgctggagagaccccgcggctgggcgttcatctaccacgctttcgtgtgagtacccgcgccccctgctatgcccgctgcaggggaccactgtccctggccccctggggcgtgctccgcgctcgcgcccttgggcccccgcgcgcgtgcacacgtggtggcttttatttcttcgcacgtgttcgtggtcttccttctggagcctctcccctcccccagccccacttctctcatctctacagcttgaaccttttccccgaggacacccaatgaactgcccggtagcttcaggctcccggggcgagagccaggcagacgcgggacttaggctgcgcggataattgggagcaattaggtcccaagatacgtaaacttcaaccgaacggggcgcccgggagctagggaatgcaaagggaggacaggcgcccgtgtgaggcttgagagtatactggagaggttaggaggtgatggcggggtaggacggggagaagtgagggggcatcgagggctaggtcctcagtcctaggggcggagtaggggaagctgctacttggagagagctgctaggttttaagcgcgcccggaaacacgcctcgccaccacccagccaccaccaacggaaaatctgtcagtgcatgtagcccttcctgccacggagaaggtggccaaggtctagaggaggccagcaggccaggcgaagcaacgctcccgcgctgcagggggcggggaggcagcggggaacctggggcgcaggaacgcgggcggaggtgcgatagcagaagcgcaaatgggtcgcctctgacagagatcgggcagtgggttaagtccccgtttgtggcgcg

SEQ ID NO: 645 - DNA, 1204 bp, Homo sapiens
ccgcgcgtcccaccctgagtaaacccggagcctagagggctgcagaaacacgtccgccaggcgtctcctgccccagaagaggaggccgcatggatgcgtcttttttccagagacccccccgccacagccgccccgcaagccaagatcagagaaccccttccttgggtggggtagggggacgcccccggccaaagcctggattgcggtctggcgtcccggcagccatccggatgctcgcgaggaccgtggcctgtttggcacaagagccccactgcctcccagttcggagcttgctggggaccggcaatctgggcggtgctggaagtgtcccctgaacctctcagttttcacccaccttctgcaatctccctgtaagcttaattgactcttgacacaccgcactggaggcggggtgtgtgtgtgggtaaactccgtgtgtggtgggtgatattgcgaagtgttggcactgcggccgctttcgctcctaggtggccgcggtcggaaggtgggtcaccccgcacccttgcggccggggaccgactctccttcgcgcggcggtcgccacacttacgggatccgaggcgggatctcctccatcgatttgaaacgccctgtccacagcaggattttcttgtcgaactgcgaaggcctgcgctgcgtggggactcggtgaatctcccctgcagcgaaagcaacccagatggacgcgggaactgacgcaccggcacagaggatcagcgcgccctcaagccgactcccgggccggcccctcgctgccctcccgcaacctcctccctcccaggacctccccgtcggagccctggctcaccgtgaccttggggcccagaattgctgggggccccgccgctggagtagcaggggagaccccggggcggaagagccggtgcgggccgtcgcgtggcctcgagaggcgccccggggccgcagcggactgttagcccgcggccaaggcgcagtaggctcccgaccgccctgagcatgctgcccgcttgtcccgcgccgcacccgcacctccggacccagccacaggcgttgtccccgcagctctcctcgtcccgccccggcctgccgcgcgctggagagcctgggacgtgcagctggaacccctggcgctcgcacactcagctcgctatccccgtctccgcccccggccagcgacccgggatcagggcgtcaagccccg

SEQ ID NO: 646 - DNA, 1770 bp, Homo sapiens
cgtcaacgtcctgaatccactacgcagattccagcactggaggcgccggcgatcggcacccgccccctccggcatgggcgcttcggaataactgggcgccgccggctcacaccctgcccgcaatgttttgcactttgctgggtctgttccaggcctctagccctctcttcgctgctcccagccaggaagagtccgagaggcgactggagcgtcaggctggagaagtgggttccctccgcctgctaggctgtcgctgcgaccccattcccccggcaaggggtcgaagcccccgggcggggcggggcggaggacagcacgaggcccaggacttccacgccatctctgcagccccgcgcctccctcctcagccctggccgggtccccgcgtccccccgacccccgatcgcaaagccggggtgcgagagggaaagggaagtgaggcggcacgcgtatggagggtgtgagtgcggacacacatacagggtggctaggtacgaaaaaccccgcctctccccgaactcccgcctcggaccagctgcagctccaccactccagggctccctgcgccgggacaaagctgccgcggcctctctgcgcccgcggagcgcgtcgtcgcccgatctcctcagtctcctccggccgcaaccccgtcccaaaggacccgtgggccgccccagggacggaggggacccggagccgggcgcccgcagcccccgccccccgcgccctcgcccggcgccgccgctcacctgttcagcactttgcggatcctctggcgcacgccagcccgggaggaggcggacaggctcccgccgccgccgctgccctcggccggcaggttctcgatggtggtcaccacatggttcggcggggctggcgacggcggctgcagctgctgctgcggctgctcaggggggatcatcgcggcagaggctgaggcgcggcggcgatcagaacgcagccgggtgcatcgtgtgccggttccgggcccgggaacgcgcagaggacccggccgggcggccgcggcccgggaggcggtgctgcctgcgaagcggtgaggcggggaggcacccgcggctacggccgccgccgcccagcccgccactcactcctctccagtcccagtgcgcgcaccctcgcgcccgtgccgccgccgccgccgcccgccccggctcttcccgagccgcgtccccaagtcctggcccgccccgcgaagtggctgcgaagggtgtcgcgcgggggcgcggagctgccggtcggttccggggaaggagtcctgatttctccttgtttcctcgtgcccgggtctcctcggggcgcgcggcggcagttgtgctggcgccgcctcagcctgtgccccgctcggtcggaaagctaccgtctgtgtctcacggagtgagagaccgagggtgaacccggagagccgggcgggggcgccggcggcggcggcggcggcggcggcggcggcggcagagcggggcgcgggcgggggacctgcgcgctctcctctcgccagagggcgctgccgaggtgccttgttgcccccgaccctctactgccccgtccgcagaggcccacggtctaggttgtggtgattgttttggtttgggtgttttttagggggataagggggctgggaatagatcctccctgtggagttggcggggattcctcgtttctgcccaagcgccgcggaatccagcaccaccggcctgggacagcggcaggacgccgagacaggtgccggccccggattagaaacccaaacgg

SEQ ID NO: 647 - DNA, 1834 bp, Homo sapiens
cggactcggcggaaaggagccccggaggggaactgagtgccttcagccaggcacgttcggggagacagcgatgttcggggagaccgcgatgttctgggggatcgcgatgttcggggagaccgcgatgttcggggaggccgcgatgttcgggtagaccgcgatgttctgggggatcgcgatgttcggggagaccgcgatgttcggggaggccgcgatgttctgggggatcgcgatgttcggggagaccgcgatgttcggggaggccgcgatgttcgggtagaccgcgatattcggggagatcgcgctggtccacccagaagcctcctggcctatggggcaagcagcagccgcaggaagcggacccggaggaaaggagccgcggaggggaactgagtgccttcagccgggcatgttcggcgagatcgcgatgttcggggagatcgcaatgtttcgggggatcgcaatgtacggggagacggcgatgttcgggggtaccgcgatgttcggggggaccgcgatgttcggggagaccgcgttactcggggggacggcgatgttcgggggggatcacgatgttcggagggatcgcgatgttggggtagaacgcgatgttcgggggcatcgcgccggtgctaccagaagcctcctggcctgcggggcaagcagcagccgcaggaatcagacccggcggaaaggagccgcggaggggaactgagtgccttcagccgggcatgttcggcgagatcgcgatgttcggtgagatggcaatgttcggggagatcgcgattttcggggagaccgcgatgttcggggagatcgcgttgctcggagagagggcgatgttcggagaggccgcgatgttcggggagaccacgatgttcggggagacagcaccggtccttccagaaacctcctggcctgaggggcaagcagcagccgcaggaagcggacccggcggaaaggagccaccgaggggaactgagtgccttcagctgggcatgtctggggagatcacgatgttcggggagatcgcgatgttcggggagacagcgatgttcgggggcaccgcgatgttcggggagaccgcgacgttcggagggaccgcgacgttcggggagaccgcgatgttcgttcagggagatcgcgccggtccttccagaagcctcccctcctctgaaacccgctgcagtccacaacctcccaggtttggcccccgccctgcttaggctacatccccgaactcaccgacccatcctgcccgggaccagccagacagcaggtgcagaagcgggaggcacagaaggaacgcggggctggcggccgctgccattgtagacctggagctccgtggacaggaggcgctgatggttcccttcgaggctcacaccacggctgtttataaagctgcccagcccggcccgccgcgcgcagggatacactgggcgggatcctaggcatgcacttttttggggatgctccaccccgtcacgccccgggctcgtcatctgacagcggcctggctgacgcaactctcccctccgacccgcccccgcggcttggtggcggcgtgcgcgggccccgagcgggccaggacgccgttccttccgttccttccatggccccatcaaataatttttcaacacagcatttatcattaccccagtgtaaacactgatgcacaggaagatgaagaaacttgcataggaatactcagtggcggcggtgtctccctgtcaccgcctgcgccagcgacacccgccctccctccgcctgcagtcgcgaagtccccgcccctctccgtccagggcgcagccgcttccccattccggagcga

SEQ ID NO: 648 - DNA, 950 bp, Homo sapiens
cgggctttcgggtctgcctctcgcacggacggtaagtgggtggagagtacgtttttttcagctgcccggcgagagaacttgactctgaacgcagcgcgggctgcacgcagaacccccgggctgggccgcgcgccccgggctccctgcgcgcaccctcgggtcgcgcgtcccgcggctcccgcagctccctaggctctcccttctccctccctccctccctccctcctgccgggcgcggcggccaccccgacgggcggcgcgggcgcgggtacctgtagaatgccggcgggccggcctcgcgcaccgtgtagccgctgggctcgttctccaggtagtagggcacctgctggccgtggggctgcaggaaaggcgacagctgcggcggcgggtgcagtagcatcagcgggctcggagacacgctgttgagtggggggaaaccccccaggccgttggagccgaacgccgcagcctcagacccggggccgtaggggaggccggtctgaccgtagacctgcgcgttggcggcggccgcggcgttgaactcgtaggcggcgccctcggggtagttgtacacggcgggcttgctgctgtccaggtacacctcgcccaggggccgctccagggggatcttgagctgcggacggttcaggggctccagctcgttcccttggatctgatgcagtagggccatcccagatgctttggtgtggagggtcatggtcatggtccgtggccgcgggcagggtgcagaccgtgtccccgcagggcagaaggctcagaaaccggcgggccacctggaaaaagagcacagcccgaggttagaggcgacgcagcgcatgtcccgccgacacgcgagctctggccccggccctgccccgggagcctgcgggtccggtgaagccgggcgacccgacgggagcaagtgcagtcccaggacgaacgccctccgc

SEQ ID NO: 649 - DNA, 1218 bp, Homo sapiens
cggactcacgccggctctgccacgtgttgcccgcagtctccgcccgttccctccgcgttggcaacgggcactgactgcccgatacctcagcgatcgtagagactttcctaatgccgggcgcaccaccggcgggccagcggttccgttggcttccctgacacacttcctacagtcatttctttcagctgagatcttcccctttaatacctcgttaattaacgtgtaaccttttggttaaaatgtcagagctaagactaaacctgaagaaaagaatgaaaccacaggaagttcttcagacttagtcgccagcaaggttatggcccgaagcggtgcaggggcggcgcgccgggaagctactggcagagctgtgcgcactggggggtgctgcaagcgctggggagagtgtggagaggctgcgtggagctgcgcgctcggggtgggagctgcactcccaatgaagcgcgtgaagggcaagcggtgatgggttctgcgccagtggggctgggagcgtgttgggggctgtacgtggggctgcgcgcaaggtgagaactgcgcatgtgggcttggggactgcgcgcaccgaaggctgcaggcgctggggagggtgttgggggctgtgcgtggggctgccctcaccggaagctgcacgctcggggaagcgcagaggcggggtgctgcgcgcgctggggagcacgtggggggacacgcagggggacacgcagggactgcccgcgcgaatggcttcgaacgcatgcgctccaccctacatttcacagtcgccatgacgaccgggaggtccgctcgtcaacggctagtcaacggctgcggggacaagtccgttgaggctgccaggcgagtcaggcctttctggacctcgcctgactcggatgggctgtgcctgaaattgacccagctccactagggattatgaagaaacaaggagtaaacccaaagccgctgcaatcttcccgccccagcccgtctaagcggccgtacggggcctcccccgcccgggagctggaggtggaaaagtcggccctaggcggcgggaaactgccagggggcgccaggaggtcctccccggggaggatcccaaatctgaaaaagcgaaaaggcttggagctaaaggtggtggccaagacccttctcgaccccttccagttcgtccgtaattccctggcgcagctccgggaagaggtgcacgaactgcaggcgcgg

SEQ ID NO: 650 - DNA, 795 bp, Homo sapiens
cgggcggaggcgcagagtctcaactcctcaccaggcgaccagccgtggaaagcgggcgggtttctcagcggcaacagcgactaccacctcccgagaagacgcggccagcaggacgcagggggaggcggtggcagcgcgtccctgctccgcgccccgtgcggggctcctgctgccgacagctgctgctctgacagaggcggcggcggcgacagcacagagcacggaggggacccggcgagccagtccacatgctgctctgacgaggtggctgctcaaccgcgggccagcgatatatttatttaaggacaacttccagggtccaccagggaatcaggaattcccccgcccctttcctcccgccccctgccttcgcgcctggcgcctgcccgggggatgctcaggcgcgggtacccatcgtccggccgggggcgtcctgggctgctggctgcagtgtgaagatccagcagcagccgccgccaccgccgctgctttgtggggagagtggcggggagtccttgggagcgccaaagcgctgcccccgctgcagtcgggagagggcggaggaggagacgggcgggccggggtgaggacagggagttggggacgcggcgacctgtgcttgaggagggcagttagcgcctctgctgggagctgtgggctcggggctgcccaggaggctcaggtgtgctgtggggcgaggccaggaggtgacagctgccgctgcagccgcggggggctctcggggctgcaggacccgcctctcccacctcccggcctcagccgcccagccccccg

SEQ ID NO: 651 - DNA, 686 bp, Homo sapiens
cggtccaccctccgactccggggaccgaggggctggaaggtggggagacgcccgaatctcacctgtgaccgtgagcctggtgcccggcccgaagtactgctcgtaggagcacggaggtgcacccccgcatgcaaacctctaaggctccccgagctcctgcccaccctggggacccagcccaggtctcccagcacagggccggaccgggtgccgcgaagcagccgccgccttccacctgaatcccgccgcccgggtggtcccgcgaaaactcacccagcacggtcagcctgctgccggccccgaaagtcaggacgttggccccagagcacagcccggggactccccgcaaaaaccagacccaagccgcccgcgcccgcgccccagcagcccgcgctcaccgagcaccaggagccgcgtgcctggcccgaagtactgggtctcttggtcacggcccccgagccccgcacaaaaacccgagcgcagtctcgtccccggtcccccggcggccccagcttacccagcactgagagccgggtcccggcgccgaagtactgaatgtttttggctcacagccccgagacgcggcacagaaactggccctgcgacgcccccggcgtcccggggcgccccctccccagttccggggcttcagcgggagcccccgcttaccgagcactgtcagccgg

SEQ ID NO: 652 - DNA, 1565 bp, Homo sapiens
cgtccccagcgaagtcggcgccggaactgccctaatggaaaccagccgccgggcgctccgggagggctcaggccgaccccggggtccattagaggcgccccaggccgagggagcccgcggcggctggaaggtgaacttgacatcccggctccaccgaccccgcagcggctcgcacctcatccccactccggccagaccaaagtagaatcctgggtgtgcgcgtgatttcccagggagggcggactcggggctttccctgtcgcaccctccattgggggaccgcccccaagtccccgagagcccctcgggcagagtccttagggctcagagcatgggaggacctggcttgcctggtggaggcgagtagccgaggggtcggtggagctgcgccccaaatgagttcccggcgcgcgattctccccgaccccgaccctttgtccgcctccccctccctcgtcccggcccttggctcaggggacccaggcggcggcggcggaggtggcagaggccagagcccagaggcgcagcccgggcagctaggagggtcgcacgtggagccgtcccccggacccgcacagcgacgaaggggggaggctgcaggcgcgcggggtgggggctggggcgcagcccgagaagtgggaggggatcgggtgaggggtggtctctgaggaggagccaggctggaccgtattgttccgcgctcggccggggagggcgcggggcgctcggcttcccgtgttcctctccccgccccagccccgtgggcgcgagaggaggcggggggctccttgtgcaccagagacgcagctgccttgttcgcccggtggggtgtggatcctccgagcggtgctgggaagggggttctctctgcccgcgcgcccaggactctacccagggcggaggtcccgagtgggccgccccccgcagcgccctgggttcgcgggcccagaggctggaggcagcggggagctagggtccttcaccctcccctcgccgcgtgcctccgcaggagtcgggctccccgttccccgcgatggccgcgggccgcagtcgtacggagccgccgcgcggaccccggggcgcccctccctagcggggcgcagctccttcttgttccccgccctgccagcgggatggggggcggcgggtcggccctgagggtctgcgccgaccaccgcgggggcatcaactggctgagcctgagccccgacgggcagcgcctgctgacgggcagcgaggacggcacggcccggctctggagcaccgcggacggccagtgctgcgcgctcctgcaaggtagaccctcccactccctccctgacctcttcgccgcagctcaccggccccagaccgcggaccccagctcctgcgcccgcagacccctttctagaagtccagcccccgctcatcccggcacactagcggaagagcgcttgtctgggcccagcatctggctgttgagcgcacggcagggcagggtgaggtctgggggtggggtgcgggtgcagagcagggtgcggccgggatcgggtgggtgggtcgaggggcgtccgctacaaaggcga

SEQ ID NO: 653 - DNA, 1911 bp, Homo sapiens
cgtcccacgggatggagagggagtgggtgggcggcagctcccgagccggggaccccggctggctcctgtgcggcgtgacggggtggttggctgagccctaggccccctccgcctgccgcaggctgggctggcgctgcggacccaagtgcagctcttccccgcggggcacgggcgcaggcggcgtccccagggaggcgtgcgcgggagcgccggggatgggggacgggcggggctggagcggggacctacttccttttctgtcccaagaggactcaaaggaaaacaattcacttgatcctggatacgttttcatctataattcggaaatatgcaaatgaaaggcccacatggtctgaaaggggcaaatcaagctcccagcgtgcggcgcggggaaccggctcttccccagggagccccggaggcgcgcgccccacgccgagggcgcccggggaggaaccgcaccccgggctcgggagtagcgcgtccgggccctcagcggccaccgcccgggggctccccaagcccggtccttgccctctgccgcccgccctctaggccgagcctccgctcccgcgatgtcgccgcgctcgccgccgccaggcgcgctggtccgccgggtcgcccgggcgcggggcgcgccgcccgccgcagcctcccctcttcccccggcttggccctgcggcccgcagcggggtccggggtagagcggccgctttgttcccgccgcccgacggcgcggggctctgcaaaggcggaagctcggcgctcgccatgaccccgtgcggacgcccagtgcgcccagcctcgccgcgccggccgggcccccgggccttcccgcgctgagcgcccgaatccgccccttccgcggccgctcaccgcccgccgccgccgcagtacgagccgcctccccgcccccgcccccccgcttcgccgccgccgccgccgcaggagagggagggaggcggagggagggaggcggcgggccctgcccagagcccgtcccgggcgccggcaagcgagctccggccgcggcggcagcgccatcccgggccgcgggcagccgcccctcgccctccgcgtccggaactgccttcgccttcccgcgaccccgcagcagccggccctcggggcgccacgaacgctgtcccctctgtggagcagagacccccttccccttcttagggggtgtcgcctcggggatcgctgagcgctaggggtccaggaggcggggacgggagcgccgtgacccgccatggctcaagcggccaaacagctgaagaaaatcaaagacatcgaggcgcaggccctccaggagcagaaggagaaggaggaatccaacaggaagcggagaaaccgctcccgtgaccgaaagaagaaggtaggagggggcggcggtgaaagcccagcgaccgcggcacctgcaagtggctgctgggggcaggggtcgggcggcccgggacgcggtggggcgcggcgcccggtgcggcggagttggcggcacccgagcggggaaggctcggtgggcgtagaggagggacggaggcttctgcgcggccgggaaggggacagggcggcaggctggaagggcagagcgggtggccgggaggctgagggcgcgcagaatcctcccgccagctgcccgcagagacctttcagcaccttggacagcacccggcaggcccgcgctgctctaggaccaactttcccggccttggctgccggctgcgggtggtgggctgccctgctcgggcgcgccgcacccgctggctttccaggagagctggtttgggtaaacgcggctgcaggctccggggagcgggccgggggggggcagctctgcccggcttctccctaggtgacccactctgacgaagagagcgtctttcccaggtgtctctgaacgagagtcgg

SEQ ID NO: 654 - DNA, 2213 bp, Homo sapiens
cgaaggcgacgggtccaggacctgcagaaaccgctgcggtttggggcggtcggggacccacggcttcctggggcggctctgaacaggccttggggcgcagcgtccgctttctaaagaagcctgggatcgggtcctgcctcgctgcaagtcacgcttcccgtgagtccacaagtgcaaaaccagaaaagaatgtttcgcccaaataattaaagagcggtggcccccgcgggggcagcggaggcggtcagcagggtccccgtccccggggagaagtgcccacgatccaagggctgtctgctctaggaacttcttaaagaattacagacactgagagcattcggggtctggtaggaagtgcagtgtatctcccagctttagggtaactaggacagcatgaatcttttaccttgtggtagaataaacggctagcgcctcgatgtggcgcgctcgacttttcctcacagagcctaaaagtcacgctcaaccaaactgcagcgttcccgcctcagctgggcaccggcctggaagcggcctggaatcagactggactcgaggaggtaagacctcggcagcgcgaggttaaccacaggcctcacccgcggcctccagcccggccccaccgcagccggcggcagacaccccaaactctccacacgccgccctcagcgaggcgcctcggggaaagcagcgtgaggcagtgagccgaggggcggggccaggaggacgccccgcccccgagcccgccccgccggagggtttgattaatgaccctctaagccgcctcagcccccggcgtagcctctccggtgggccaggtcctccgcccgacctgccttagccggtcggagcacacacgcctggccgcggggcgcccgcataaaagtcacagccagcggaggttggaaacagccgtcgacttgggcatcggccggacgaggatggagtgaccagcgcggccctggccacacaggccctgctccacgcccctcgcccgccctcacgacggagcggagctccactcagccgctccaggaaaggtgaggggcccgtcagacgcgtactgcgcagctctcgggctcggaacggtggcgggtgccgtaccccgaggtgaggctaagggtcccccgctcctcgggcagaaatcccccctggcgtgaaaggccgagggcggctggtgagccgtggttttccgcggcgtcggcgagaaggagccgcgccacctctcgtgcgtgccgggttggataaagtcacccaagcgcgaacgagtgctgatcctgagctgtgcttccgagatctttcttcccgggtagagtagaccttttgcttaatttgcccctgaaaagcaaagccggcactgcgcctcttcttatccttctaggaagcccaagaactccggagttccgcaactctccccagacgtccggaagcaaatcgcgtcccaggcaaaacgagctcgcttgagagcgcccttagccccgttgggctgctggtgggcgcacggggagaaccagggggctgcgcctctcgggttaagcccgaccgccccccggcctcaccgcaccttcggtcctttgcagcgcgcgcggcgcgggaagctgccatggaccgcggccgcccagcgggcagccccctcagcgccagcgccgagcccgcgcccctggccgccgccatccgcgactcgcgtcccgggcggaccgggccggggccggcgggccctgggggcggctcgcgttccgggagcgggcggccggcggcggcgaatgcggcgcgggagcgcagccgggtgcagaccctgcggcacgctttcctggagctgcagcgcacgctgccgtccgtgccgcccgacaccaagctgtccaagctggacgtgctgctgctggccaccacctacatcgcgcatctcacccgcagcctgcaggacgacgccgaggcgccggcggacgccgggttgggcgccctgcgcggcgatggctacctgcacccggtcaaggtaagcgggcggggcgcaccgcggggctggggccgagaccaggacaccttgatctgccctgccagtcaccgtcttgggtagatgctctaattccttttcgggtgaggcgggaagccgaccgggagaacgacctcggcccgcgagggtactggtggcaaggtccccgccgcgaaagccggctccttcgcggttcacaggtggctggagaggcgtttaaagccgg

SEQ ID NO: 655 - DNA, 1247 bp, Homo sapiens
cggggggcaggccgcgagagggagaggatcccgggagcagacgaagaagtggagcagctaaagtctgcgtcagaagaggttggggactgcgagaggagaggctggggcctgcaggggagcgcagcagcttttagcatcgatccaaactctaaagactcgtggcctttgcctgacctcgagggtcgggaatagacgcctgtctttgtggagagcgatacccaaccgagaaaatggggctgttccgagctgggccctgcgcctggcccagggcgaggcttctctggctccgggctggcccctgaggggcgcaaacggcaggcctggcggttggggccgaggagggagggtaccaccgccccgaggcagcacgcagcctgcagcagaggcgcctgctccaagctgtctcttgggggcgccgccgccgcttccctcctccggggccgctcgctcccaggaaagtggaggcggctggcgaggaccgagagccggggccgcgctgcggagggaccacacctccgggagttcgagggggaccctggcgcggcgggccagcctttgctccccggccacgggccggcagcgcccgccttcccccggtcagcgcttgcggcccgcgccgcgcgcaccgcccggcaaccccgcgcgcgtcccgcgggggcgctgcgtcttcctgccacaccggcgcaccgcggcccctctcccccacacctccggcccgcaccacccggctctcctcccaccctccccacccctcctctgccctccctccccattcctcccctcccggcgaggggcgggagggggcgtggcggggccggggtttgtgtggctgggacccggctcctcgcactccgagtccgcccgaggagccgggccccggccgctgtccagccgctccgtgccccgcgcgtcctgcgccgccgccaccgcctcctggggagacgcagccacttgcccgccatggatactcccagggtcctgctctcggccgtcttcctcatcagttttctgtgggatttgcccggtttccagcaggcttccatctcatcctcctcgtcgtccgccgagctgggttccaccaagggcatgcgaagccgcaaggaaggcaagatgcagcgggcgccgcgcgacagtgacgcgggccgggagggccaggaaccacagccgcggcctcaggacgaaccccgggctcagcagccccgggcgcaggagccgccaggcaggggtccgcgcgtggtgccccacga

SEQ ID NO: 656 - DNA, 1861 bp, Homo sapiens
cgctcattgggcgacgtggggaaacaagctccagcccccgaagcgcgaccaaaaggagaaatcaagttcccaccgccagggcgggggagggaagctgggtgccggcaggcgctccgccggagacgagactcctcccggccccagaagcgccccgccagggccagagagggcgagcgtggcgggagggaagcctctgtcccccagcggccaggcgacccgaagccgagcgccgtgtcacacgtaccccgcctcgccctgcttgcggcactcccgtgtaactcctatgaaaatgtcctcccgtccctgacgccccgcggtgcaacctccacccctcaacgaggagggggtcgccgcaggactgggaatccagtggccggcgtcccagcattttcggacgcgttccgtgcctcccccagtatccccttgagggatcgcctactgcgattccacgtagtgtcggttacctcgccctagccgcagggagcatcaaacaaaagaacttttgcaaacttttctctctggacactcgcgggtctcttaaatctggcccccatctccccagaacttgcatgcagtcaaacaggaaagctggcgcgggggggatggtgtgcggaggaagggaccccgaagtttccaggtcatccctggtctcgaggagcgcgcggagtggagccgttccctcgcgggcccgacccaggctcccccctcctgccaccctttcccctccgtccttcccagaccacgcagcaagacccgccgagggcgaagaagttgggagtgacttcaggggcctctgcggctagaccaaaccgcaattctcggtgcccccattcccgcggaccgcggggtaacgccagcgagcagcgcttttctgaggaagggaagagggggaaagggtgaccggacgagcgcatttgtcccagcggatctccggtgtatacttggggactgggggttccccaggtggcgctcccctattccctgcgggctcctctcgtagcttcaaacaccctaaacggcgcgcgcatcctccgcctggcccactcaccgactccgccgacacgcaggccaccaagcccaaggtgagcaggatccacgcgcgccgcatattccccagggaccggctgctcccagccgctgcttgcaaccagggcaaaacgaagcctcctgcccagcgctcggcgcagcccgcgcacacgaatccggagcagagtaccgcagcgattgcggctcaggctcggggactcgggctcggggctcgggggcgctcgcttcctcctcctgcgcctgctcccgccgcccgcagctgcgccccgggaacgcggcgccctctcacttgttggtttctgcactcccgacacggagttggtgctccgggaaggctgctctctgaagctcttcttgctctgctgtggttttgctcctccgcggactcctttcccgtgccgaggttcagtttctggttttaaggaataaattcgctggcttgaaagggagctacggcagaagtttaggggcagagcggcgggagcgcgcgatccgcgcggctggagctccgggggtatctggagagcagcgcgtccaagcggggccactggctccgcggctgcgcccctcctcctcccgcgccgcgcctccctccccgggtcctcctccttctcctcctcttcttttcctctggctccctccctcctgagcctgcttctccgggctcccctgggcgactggggagaggaggcggcagtgtgactcccagataaacccgggagaaattcctacaggattacacgccgattggcagctccgaggaccagtgggcgccgcggctccgcgctgtggctgcgccggctctgctcaccgg

SEQ ID NO: 657 - DNA, 3378 bp, Homo sapiens
cgggccgggccggcgaggggggctccggccgagacgcgaggcgcgtcacgggacccggcggcgggagcggacggcgagcgagcgagcgagcgggcgggcgggcgggcgggagggaggtggcggccggggctgcccaagatggggccggagccgcgggccaggcgcggaggagacggaaggggcgggcagggccgcgcgggcgcggtgcgggcgccctctcccggcagtcagcggcagcgcgccggccctccgccttccgccactgcggccccgcgccggccgcctgggcctggagccccgcggcgtccccggaggacgggctccgcgccccacgacccactcccggaggcggggtcgggccgaccgggggcggaggacgccgcaggaggctgctcggaccccgggcgcttgctaggccctccctggggcccttcatgccaggccccgcggctgtgtccgcaagcgcagatggtctcgggactcgggccaccctgacgccgcagacccagcacgctgcggaccgggcacgttggatctcgggacaagtgcggagggtcgggggctggaagggatccgagagcagagcccgcgtccccatttcacggacgcggccaccgaggtccgagaggggccggagcctgcgggagagggaagggcctccgagggctccacaacttggctgcgccccctccctagcccgggatccggatgagtgctgcctgaggccgaggcgacgaatcgccctctatccgcccctgcgcgggaccccggcaggaacaagcgcccgtccctgggatcggaggcggcaaaccccaggctcgagccccccagcgcagcgcccacccgcggagccgcgcgcctctctggcgcatccctgggcttcgcggctcggccctcagccgccgggtctcccgggccagccttctgccccccagatcgaggcgcaacaagtctgaaagcagcgccaaggagcagctagcgagccgaagggagggcgtggggcgccgggcgctccgggatccccgaacgcgcgcaacgtccgcctccggggaccgggcgcgggcggcaggcgagcgggactgactcggcgggctgcgcacacccccttccaaggccccgactgtgcgcggacgggggcgcgcccaggaacccccgccccctccttcgcctgcttgaccttgctgggtactcaaagccggactcggcggcaccccggcgtgcgggcgcagagtttcgctgccgcccacgggagggagcggctcgacctccctcgttgcctcctcggcagccggggtcgcagacgagtggaaggcatgagggttctaggagacgtgacagtcgcctccccagaccccacacaccgtataccacctccctcccagatagaaaagggacccagctcccctttcccccgcctccgcccgcgcggcctctgctgttcccccgcggcggctctcgctccgagggggcgtgtgtttgtgtctgtggggagagtaccgagggtctccgtgggttcccaggatggagcgggagagcagacctcccagctccctccccaacacaaacgacaagcggctcctctggggcgggagtgcaggccccctacccgcccacacgccttcctgcctttcaactactccggagttgcagcccaggaatctgcgccccagacccggaggaagaacggggaggtcgcggcggggacgggtgctgaaagagggctggcttagggctcttcgggtcccagcctaggcgcctgcgctccaagaaacttagaagcccaaaataaaagtggaaaggggtaaggtgcccagcggcctggggctggggtgccagattaggcgttctcttcaggctgccggggagtggccaagcaggagccgccgcggccaggaggagggacgcgggctcggagccgcagcctccgtcaagccctcccggtcgcatcgcttcgcggtgattctcagctccgccgccccctcccgaggccggaggagctctctacctcgcccagggggccgcggggacctagggagagggctcctggccgggtccagagctcccagcctccccaggagggggcgggggccgtgctcgttcctcgaggcagctccgcgcggctccaagctagcgcggcgacggtggagggccggcggcctctgctcaccggcgacgcggacccgggagtgctcggcgcccgggagtgctcggcgcttggagcggagacggcatagggccggcccaaagttgagagcggcttatccgcgcggcctgtccgacccagtggaaaggtagacaaggagggaagagccaggcgttcgcgtgggggtggggggcgcaaaaatagccctccgcccgaagtgggggagagtacctccagggagtctccactgccaatgccaggtctacaggcgagggcttctacgagcgagggcttcgagaaggagtctggggttttctcctgcctgccccgagctctgtgcgtggggggaggacgtctcgggcccttacaatgtctgtagggggccctggacgtgattagcaggagggggacacgctcgggggctctccggagcctgctgcgtctatgtgtggctgttgggggccatggggggctcccttagacccccgccagcgtctgtgtgtgctgggggtacagcgggaacgccctccccagcctgccctgtgcatgtgatgaagaggggtgccaggctgtggtgtgtggatggggaggaggcggcggcgccgaggagcctctcctgcgtccagggtcgccccctcctcagcctgcccaatgcgggctcgcggggacctgccacattccatcgccaccgctggagaaggcagggggctgagggggtagggggtgggggtccaaactcctgagctctgagcgcaaaacctcggagctgcgaagccccaaacggcgaagttaggaagtctgggcgcccgcccctcccccgaccccctcccaccctcgctgcgcccccacccgccgcgcccccagccccccgccggagccttccttaccttccccagcagcagcggccccgccggcgaggactcgatccggcgagttgcaaatccccgcgagcgcctcgcgtcgccggcggctgagccgggcgcccgaccggaggtggggggggctcctccagccgccgccgcccccggcccgctctgggcctcgccgggacgccccctggagagcacccgccggcgcacgcaggccccctcccgttcccccgcgcctgctggagccccccgggcgcccggagggtccggatgcccgcgctgcggacgatgctggcgcgcgggcccgggccgggccaggacgcggcgcggccgcctgtgctcccggctctccggctccgcgctcgc

SEQ ID NO: 658 - DNA, 1646 bp, Homo sapiens
cggttgtagaagcgggtgacagtgaggagcggggtgcagtcgtcggggtccacgaaggccaagtccttgacaaataaaatgtccacaatgttgtgccgctggtcaccctcgtacactgggatgcgagtgtagccgctgcgcaggatctcggagacagtggcgaagtcgagcaccgcgtctgagcgcagcatgaagcagtctcccaggggggtcagcacctcctccacaactttggtgcgcagctccagggcaccctgtatgatgttgagctcctccttcaccaggtcactgtaggggtctgcggcccgcaacgtctccagcaacttctcccgcgtgtagaaggtgcttatctcctggcgcagcgcccagtccagcaggcggcccagcgggtagcacacggggaaggcggctgccatcagaagccgggtcaggcacacgctgtgcgaggcgatggccagcccgtgccgcgaacacactgagtaggggcagatttcggcgcccaggaataccgcgccggtgcacacgagcgccggcagccacgggaagtggatcccctcttcgctgtagtcttccccggtgcccccgaagcccggcggcagcgaggtgtacagccagccagccagggccgcgttggctccggcttggcccaggagtagggtgcagagcagatgggtccccctgccgcgaacggcctgcacgcggcgcgcctgctcctgctcggcggccgagccgctgttccgcagcacccgtaactccaccgggtccagcgacagcaggctcaggcgcaggccgctgaacagggccgacaaggctagcagcaggagcgccccgagcgcccgcagccacgcagggggcagcaggtccccgcctgggccgtacaaccgcgggcgaacgcgcagcaggaagccgccggcggcgccgtggtggtgccacgcgcgcccatcccaggcgcagagtgaaaagagcttcccgccaccgcccgcgccgccccgctccgcttcgcccttgcgcagctcccgcactcgcacctggaccagggccgagcctgccacgcccccgggacgcaagggccccaggacttccacgtccgatgcccagtcgctctgctccctgcagcgctgcggtcccggggggcgagtggggaccgcgctgggggccacgccgccaccgcccgggggctcctcgatgaacacgagccgcggagcccagtcgccggtgccattctcccccgagttgagggtcggtgagggcaccggtgcggcggtggccggcggtcctggctggaaatagacacgcaggaggaagctggtgccttcggcggcgcgcagggtgcccccctccagggacacgcggcctccagcagtgtcctcgggccgcaggcccagcagccaggcggcggcggccgggggccgaggagacagggaaaagaagagcaggagcacagcgcctcggctgcagcagtcccggagcctgacacccaccgctgctgccgccgccgcggccgccgccatcctgcacccagcgcagctgcacgtgatactgcaggaagccgagcgagagctggagggaggaggagccggagctgggaacccagccgcaggcaggtcaccacgtgtacgcccactgcgcgcgtgggctggtggcgg

SEQ ID NO: 659 - DNA, 3723 bp, Homo sapiens
cggggggcgtccgggggtgcccggctcagcagcaggcacgcagggccttgcggaagacgttgcggaactcggcgttgaagacagtgtagatgacggggttgagggcgctgttgacgtagcccagccaggtgacggcgctgaccagccgcgggggcacggagcaggcaggacacagcgcctgcgtgatgtgcaccacgaagaagggcgtccagcacagcaggaaggcccctgggggcgccgagagccgcgttagcgccccccgcccagccggcctcgtaccccccccctcctctcctccccgcccctcaggacaggaacccaccgaccaccaccggcaggaccctcatggccttgcgctcccggccggtgatcttggcacgccgcctcctgcgggtctgcggtggagtctggggtgggagcgcggcggctctgacggcgtcggggggagcacagttggagccgcaggggtccggggggaggccgggcgcggggggcgcacagtcggggccgcaggggtcctgggggaggctgggcgcggcgggcgcacagtcggggccgcagggaccccggggaaggccgggcgcggggggcgcacagtcggggccgcaggggtcctgggggaggcggggcgcgggtggcgtgggggaaggcgggccagggccgctgggtcggcggggcgcgcggccgtgcagcttggcgcgacgtgccacctcccagcgctgcaggccgcggaacgtggcccagtagagcagcagcatgagcgggcagggtaggaagaaggagcacacggacgagtagaccacgtagtcgcggtcctccaggcggcacacggcggggtcgcggccgcgcacgtcgttgaggccgcacagtacgggcgccgccaccgccgcggacagcagccacgtggcgccgatgagcagcagctgccggcggctcccaccctgccggttgtagcgcagcggcacggccacggccacgaacctgcggggagcgccgagggggcgccggacagcgcacaggccgcggtgagggcggcgggcggggcgcgggggcgccggggcgcgggcggggagggcggcgcacctgtccacgctgatggcgcacaggttgaagatggaggcggtgcacagcatgacgtccatggccatgagggcgtcgcacaggcgggggctcagcagccacgcgccaccctggacctgcgcggcgacaccacaggccctgaggtttcccagccaccgcgggcccttgtgacccgcccccactcttatgggtagttccagggctgaatacggagaagggggcccggctgtgagccagaggccagaggaccgggcagggaaacaccccttccccacgcagatctccctttgttttgagttagggtctcgctgtgtcaccgcggctggagtgctgtggctccatcatggctcactgtagcctggaattcctgagctcaagcgatcctcccacctcagtctccagagtagctgggattacagccgcgcgccaccacccccggctgatttgtttttctttttgttttttgagacggagtttcgctcttgttgcccaggctggagtgcagtggtgagatctcaactcactgcaacctccgcctcccaggtttaagcgattctgccgcctcagctcccccgaatagctgggacaacagccgcagccaccacccccggctgatattttaaaattttttgtagagaccaggcctggtatgtttcccaggctggtctcaaactatcctcctgcctttgcctcccaaagtcctgggattacaggcgtgaatcacggcttctggccttggtctcccttttgttacaaacatgagaacggcctggggaattccctgggggcgggcctgatatcatcgggctcaaagggagcccctccccagcctggggtaggcagggtccccgctgggcctagaagcgaagctggctgctctgttggctaagttctctgtgggagactcgggcacgttaattcatttctgtttcttcatctgtaagacaagggtgatgatagtatccacatcataattgtcttgaagataaattataattaaaaatatgaagaccgtgcccagtgcccagcgtaggactccacgtggagtgactctctccaagggcaaaggagcaggcagcccctctaatccttcccgccgatttggggagattaggagcttaaacgtcgtcactgtgacgtctgcggctcgaaaggagcacaggtcacgcgtgtcccgtgctgctggtctctgccccagccgcctggattcactgtgtccatcaaggggaaacctcgagtccccctcccccacagtcggggacaccgcgtctccagctcagccctaagctgcttttctctggccgcagaggggctggcaccaaggccgacccactcgagggccagacctggtgtggagtgtgggctccatcccccaattccccctcaggcttccccccagggttctcagcaggggcctggtccccacacaccctcccctcccctgggttttgtccagcccaggtctcccctgcgagctgtgagcctccttctgggggtgtgccagcatctgcactaggtgtgtgtggtgggcagtggctgtggcagtgtgtgtgtgtgtgtgtcccacggcagccagggggctgagcctgcatctgcctgtctgtccagctggctgccctggaggtgaaatccagctacggaggggactgggcttgacaaagtcgcctgtttccggggtccctggatagaaggacgggcatctcctggataacagacgccaagacagacggggaaggagaagaggaacgagggtcgggggacagacagcgcagcgggtggaaggtcgcgaggtggcggcggtgggtgtatcgccgagggacaaggcgcagcgcccctgccgccgccccagctggaagctccgcaccagaaaggggccgggtcgcgccgggtcctccgtagggacagggacggggaaccgaggagcaggtgaggatgctcgtgcggccggacgcggctcacctcggagtagacgaagagcggcagcaccaggagagcgaggaggaggtcggcggccgccaggctcacgatgaaggagttggtgggcgtctgcagggcgcgctcggtggccacgctcacgcacacgagcgagttccccgcgagcaccgcgccgatgagcagcacgccccccaccagcgccgccgcgccctgcccagccagccccgcagatgcccccgcagatgcccccgcggccggcccgcgcccagccagcagcccgtccgcgtccgcggtgctgcggttccccatggcgcgcccgggcgggcgctgagcaccgcggacaacgccgggtcgcaagccggggagtccctcccctcgggcacgccccggccggaccctggtcccgcccccgacccgccccggctcaggggggcccccgcggcgctccaccgtgagcccagtatttgctcatcttggaattttgcgcagggagagacgggcacgtggacgaatgcggcggcccaaagagacgggaatgaagcgaggtggtggccacgggcaggccagcatcgcccggcgccgcgcggggtccgcgacccgagaaaccgacaaggatggaggggcggccagaccaggccctgaagcgcgcgggcatcgacgccagcgccatcctacccggcccgtgcgtgcgtcccggccctcgggcgc

SEQ ID NO: 660 - DNA, 554 bp, Homo sapiens
cgcacgcgagcagctacacacacgcgcacacacacacacacgccctgcctcccgcataaagcaccgcaggcacacacgcgcagactgagaatagagcccccactctaagcaccgcgccccctcccctctgcccgctcccctccatgggcgtggctgagccggtggccaatgcggaggcgccgcccgccccacccccgcacatccatcctggctcttgggtttgtacaagcacaaacggctccttttcatttttaacgagggctggggaattaacgagcaggattagtccatcaataagtaaagagaccgtcaggagggacattcatcccctgagggcgccggtagggggagcggggctgagccgcccgccccgcatcgcgccgccccgcccagcccgcagcccacagctccccgagccgctgctccgcaagacctccactcccgtccccactcctgccgcccggcccagaagtgtggtgggactttgggggcagcagggggcgaggggggcgacggtgggcccgggggtgtccgaggtgctacgcctttggcgg

SEQ ID NO: 661 - DNA, 1101 bp, Homo sapiens
cgctgcgaggatcaagggagatggaatgcagcgtaaagccccacgtaaacgtgtcgtgcaacatgaagcccctcaccctgagttggggagcgggtggcacgcgtggaagctgaatgccaccatccctgggaccaggcgcagcgccctccagaagcgcctctggtgacgggctcctgttctcccccaggacgtttcccccagaatgccccggggccctggacggctctggagaggacgggagggaagggaaggagacgggcggaacggggacgtacctgctttcactgcactccttccgctccctcaccctcagccacttgcggaggaggaagcgttttcggcgcggggacgcgctgggtgtggagcagttggaccacggggtgtcctcgtcgctggagggcgtgatctcgatggacggcagctgcaggaactccttgccgggggccaagacggcgggcaggtcccgggccagcccggcctccaggctctgctcctgtacgttcttcatgcggcgcatcttgaagcgccggcggcgaagcgtgggggtcgacgaactggaccagaccgggctgccctcgggcgcaccctgcggctcgggcacctgcagggcgggcagcggccggttctccatcatgttggccgccggcatgggggccgtcgcctctgcgctccccctgagccctccgccagcggcctggttcgcgtctccctctggctgttccccaccctcggccccgcggcacactccccaatcctggggccgaaggaacaagttcctttcccggagcgcagcgaggaagggacgcgaggggacgcggcgtagcgcgccgccgcccggagtctaacttttcggagcgcgcgtcctccgggccgtcagccgccggcgaggccacccgggaggggcgggagccgcctgccagccactcggcagccctcctggggctcccctcgcgcgcccgcttgtttttcttccgctgcgcttcctcgcttgctggcgtctttgccttagcgggactcggcagccaggggccccagggggcggtgcagcaaactctcagcggtttgcgttcagcagaccaggttggggagccggcttggcgc

SEQ ID NO: 662 - DNA, 548 bp, Homo sapiens
cgggcgggcacagccccgggctctgggaagacgccgctcggcagccgcagtggccgctgcatcaatgggttttggggcagggaggtgcggagcccagcctgcgctcctggctacccctccgcgccccgccgccgcccacagcctacccttctcctctgcagccggtaggcggccgtaacacgggcgggccgagcacgtgggcgcctccgtcacaccctcacacatacacacacgcgcgcgcgcacacacacatacgcatgtacacgcgcacccgcacccgcgcgcctgtatcccgtgctgtttccctggcagacacacaggcgctcacgagtctctccttgccagcctgcagggcggcgacccccaaaacccagctccgggtcccaacctaggcaagaagctgcttctctgccaacagctcctcttcggcctccgtcacagccacctggaccctaccctttcgcgactgctgctgctgctgcccggacgtggaagcagcaagaggcgcttggtcaagacacactgacggtaatggcaagcgcctacgc

SEQ ID NO: 663 - DNA, 1153 bp, Homo sapiens
cggcgcacacaagttgaggactgccgaggcgtctcctgcgaggtaaacacgaagtcgcttggttagtgagaagaaacccgaggtggcctctggggcagacagagcaggacctgcttctgccccttgccctcctcgtcctcctctctccagcggcggcgaccgcagtaacagcggcagtggcggctgctgccactgctctgccgctgccgagccggtcacctgggcacccgcggagccgcgccgctgctaccgccccggcggcctcccggagtgcgcggagggggcggcggaggagcgagatatccatagtaaccgaggatgcgaggggcgcccagcagcagcgagtgcctgggagccaggaggaggcccccgcgcgccggcaacccccagtgctaggcgccctgcagcccccgcgcgccgcgcctgggcccgcatcgctctcgcagtgagggtccgcccgagcggtaagccctccccggcggccaagccgacacctcccccccgcctcgccgcccaccccgggcagcagccgcggaacaatggagagcgcagccagcagccctggagacggcgttcgggggaggacgcgccgccgccgccgccgctgccgccagggcaggcgcgcgccgcgtggagccgggcgggtgcgagggcgcgcggcggggggtggggggcacgcgccgcgcggggggcgggggcagtggggggcgcgcgcgcgggcccggggagctcgcggggagagcccggcgctcggcgcagcgcggcgcggccaagctccgcgcctctcccgcccttcctcggcgcgctcgccctcgcctcgccgctcgcattcgctgggggcgcccagaaagatgcacagaggcaacggctaggggagcggaggttcaagccacatgtctgcgtcctcgggggccagagcccgccagccctcgcggatcccggctcgcggccagcccgagcggctcgggtgagtagcggcacagcggccccctcgctccgcggcccccgctcgccgagacgtggctccaagaagtggtgccgcagccggggcagaggcggaggaagccgagtcgggcaagccgggaaggctgcggagacgctttgccggggcaggtgttgcagcctcagctagcggtctctacggagggggcgg

SEQ ID NO: 664 - DNA, 1146 bp, Homo sapiens
cgtcccagaccctgcgcccggcttcagtggggcttctcgcctccctccggtctgggcccccttctccgacggctcctgccgaagggggcgtccctgcccccttgttccctctccacggtgtcctggaaggcctgggtggccgcagaacgcacgggggaggggtgcggcgtggaccctcgggcggcgcgcctggactgcggctccggagctgggctgggggacgagggggacgaggggggcgggggcccgtgggcacgccccaccccactcgtgctcgcgacctgccaggagacaagaggggagagggccctttaagaggagagcgcagcaccccctccccccttcccaggagagcattcggctgagaacaatggggaaccgaagggggacagcaaggggggcgtacggggtcgccccgcccgctttcccttggggcaggcctggagggaaggcaggggccgggggcgcggttttccgagactctccgcctggggggcgccctccttggctcccggagccttcccttcccccggggccctcgccctgccggggggatgccgggtgcgctggggtgcgccgggaagcacggggatgcgcggcgctgcaggcgcggcccagggcccctcgggggtcgcgtcgcggagggggcgaagccaggagctggatcgtctctgcctcccgccctgggggtaacagccccgcttccccagcccagacgtccccgagccgctcgcgggcccccagcgggagccgggggtggggtccctaagcacccgcgttctcaccgcctctcttcgtctccggctccggctccggctcgcgctccagcaccgccgcctcctgggctccccccggagtgggagggagccgcggtcccgcctccgcgcccgttccctcccaggcccctcggccgccgcgccgagctttccgcgcgtggacagactgcccggccgacggacggacgcaggagccggctggcggccgccgggatctcgcgggtgggaggaggcctcggccgtgctccgggagggagaggggagggggcggaggaggaggaaggggaggagacagatctcggccctgagcgccaccggcgctgacacgcgagtctcggggcgccccaaatcctcggccaggccctcccga

SEQ ID NO: 665 - DNA, 961 bp, Homo sapiens
cgtcgccgctgtgagcgcgcgaggacccggggctccaagtggtgagaatcactcgagggacccttcggatgcctttttccccctctgcttttgagctctgcagcacagcggtgccggccgccggcagggaaggctgcatcttctctgcgccgccaaaccgtgcccaccatcgcggtgactgccgcctaggtcgcatccctgagccgcatccgcgcgtaggggcgcacgggcacgcgcacagggaggccgcacacacacacacacatctgtacagggacgagccgggggtctctgacgcccgccgctcacctcgccccggcctggagccttttggccccgcaggtgcagcgacgcccagcccccgtgcggccagcgcgccgcgtcggcggatcctgcagcccagagagcccagggagcccagggaggggagcggggcgcgggcggggcagtgtcgcataaccgcaggcgcgccccgcgccgcccccgccccgggcccaccctccctcgccgcgcccctcccagctcacccacggacgagcggatcctcgacctccgcggcagggacatcttaagagctttgtccaggcctgcgccgttcagcatctcgcccgtgtcgggggctcggcggccccgggcgagagacggaggctacgcgcagggctgggcgcaggggccgccgcccgaggaccatgggtgggccagcgcctcgccgggctgctagctggcggggaccgccggcgcctgtgccgggccgcgcccgaggctgcgccgtccgtgccgcagcggccaatgcggcagcatccgcgaacgccaccgcggcgggccccgctggcccgggctgcggcgtgggggcgggggaccggccctgagcggagccccgcgggaggaggagcggacgggaggctgggagggatccgcaatattacgcaggaccggggcttttaggtgtcggggaaggcga

SEQ ID NO: 666 - DNA, 1040 bp, Homo sapiens
cgcatgcagcgcctacctgaggcgaccaaattcaacacagtgccctcggggctcgggaggagaaactgaggcccagagagcctccgcgatgtcagttacgttctgcaggccgggcctttcccaggccaccatagcggctggcggagggagcgcgcgccttgctggcctggagggggcgggggccgtggcggctttaaagcgcccagcccaggcgtcgcggggtggggcggctctggcggctgcggggcgcagggcgcagcggccaagcggggtccccggaagcacagctggggtgtctccacctacgactggccgcgcgccttttctctcccgcgccagggaaggagcggctgcggcccccgccgggcggaggcacggggggcgtacgaggggcggaggggaccgcgtcgcggaggagatggcgcggcacgtgcggtgacggcacccgagccctgagggtcccagccccgcgctccgcgtccccgggacagcatggagcgcccggagcccgagctgatccggcagagctggcgggcagtgagccgcagcccgctggagcacggcaccgtcctgtttgccaggtgagggctacacgagcgcccggggatgcgggtggaggctgcctcggcgggaaaggggtcacgcggcaggaccggccccgaaggagggaaaactggccgctgccggggcgctggggcgcctgccagatgtgcgccagaggagcggggcgcggcgacgggtggcacagcccctctgcctctctctcgaccgtgggcgcctgttgccaaccagcgccgcacaccactctcccagcggggctcaccgggccgggcgggatcccctcccgcggatctccccacatctgggcgggtggacctccgtccctgcgcggcgcctccaccccgccttgtgcctcctgcgtcttccttaggtagcgactgcaggggtgcaccccgctgccggtatcagggtactggggtgccccgagagccggggaagggagatgtgtggggcgagctcctgcgcccgcgtgtgagcgg

SEQ ID NO: 667 - DNA, 1497 bp, Homo sapiens
cgacaccgtgggcacccttagcgtctccgacaggaacttctggtggtgtccgaatacggccccccgcgttgtccccaggggcggactgcctcccctccaggactttctcctgagccggtgggccatgccttctccccgcctgtcgggcatatctttgtgcacagcccgtgcggcctggcctggctctgcgtcccacgctgccggtccatctttccccccaaatgcagctccacaagcgaggcgggatcggcgccagtgcccagcccgggatagcccggggcaggcggccacccaccagcaggccctggcgcggaggcatgcggggtgggctgagcgcggggcccctgcgcggaggcttatccacgacctcagaaggggcttccggcgctgctgtcgctggaaggcattttgtgctgggccctggctggcccggggctggcccctgcggctgcccgggctgttggaggagggagaggtggcggcctggccggcgcgcacttgctgtttccattctcagcggacccgcgctggggtggccgccggcggcagcggtctttcgggctcaccctcaggtttaaccagaaatccgggagtagctgagagagcttcggagctccgtgcactgtgcgctgtcctgacttgccaaaaaagaaagcagaaaaacacccaaagcacgttcgagaagagaagggggaaatctggggtctgcccttcctttagaaaagccgaggttcagggtgagagcccctctgagcggtccttggttgagctagcggagcggggaggctcccggcgcccctgcgatgagaccccaccctcacgccggctgcgccccgggacctccgcgaggattcgtccggcgggcgcgcgagcgagcggggtctcttcgggtttcaagcggccccggggccggcgcctcgtgaccctgccggactctccctccccgcgcggcagcgaagcgcatcaccgaggctggggccgggctcaccgtggggccagagcccgctcccagcaggatctcggcgaagaccagcccccgcacgccagcccgccgggtggaagcccggggcaccaggacaggcccggaggcggccgcggggcccggtactgcctgcgaggaagtcgcctctgcccggccacgccgctcctcccgcagcggtgctcccggggttgcgaccacaaacctcggcgctctcggggtgatgcctgctccgccaccagggcccccgcgcgcacagccccctccctgcgctcgctgttgccggcagccgtggaggttcaggcatttggcgtggccgtggtcgtggggaaattccccgcgtgcgcccggtgcccccaccctgctgtgcgctccccgctcctcatgccaggcggggccggaggccggggcccggagggtggagagacccttggggacaacgaggtctcagagcacaaacgctcagcactgcgggtgacaccccgggtcccagcccgggagcccgcgggtggagccgc

SEQ ID NO: 668 - DNA, 1845 bp, Homo sapiens
cggccgggtgaggtggatacacgctgaaccccgaagacgggaaaatccagagtctggagcttcacctggctagagccgagccagccctacccactggaggcgccacagcctggctgaaggcgctggcgcggcgcggtcctctggattagggctgcggcgggagcgcacgatcccgctgcaccagtgggctgggggtgccgcaacaggaaggccccagcattcaaactccgtaggccgtacgtgcccaacacttagcgcgtcaccggatccagaagggatcaaaggataaagcctccgtcacccgctcagcagatgtccccaggcggacccgagggtcccaacaggggtggcgagcaggaggccggggaagacaccgtgtcaccttccaggccgcgagggcgacggggctgatagcacaaggaactcggaataaaaagtctgtgcaggtcgaccctgtttctactatctatgcttgtgcattgaactccattcacaatttgggagccccagaagcttgccgtgtcgcctcgggcacgctccggagggtctgggccgcgggccctcctctttggcgaacctcgggggttttggacggacgctcccgagccccagctccgccgtccgcgccttgagcagtcgcctgcgcctccttctagatgcgcgtttgattttctaatcaatctctttgtcccctgcggccttcacccgagtctccagtttccccgtttccctcggcccccgcctgggtccagctctcgcccgactttcccgtcgaaggcactcgagtgagtgattcccgggagccgaggccgaggccggcgggtccgcggcgcgggccggagctgtatggaaatggccagaggagccggcgggcgcggcggcgatttattctgggagtgacagcccctttgagcgctcggcgaatggcattttctgtctgtgaaagcctttcttcccacctctgttcagattagcccgggggatgaatgcacccattatccagcccgctgaccattctgaaacgccaaattaattactaagcactgaatcaggcgccggggccggggcaccgggaggtgtgaaaatagcgagcggctggagatggggaaagcgaggggtgcagcgccgagggggccgggcggggtggcccggggcgcgggcgcggcagggccggggctggcttggccggccgccgagcgcgacctgccggcgtgaccgtgcgcgaccgcggggccagcgggctacaaaggacccgggcgggcaggaaggcgcggagccggggtcgcggcccggagcaggctggggctcgccgggaccgcggccagagcgcgccaagtgcgcaggacgcggggctggggctctggcgtgcgcccctcgccgcgcaccagtgcctacttttccacgcaccgcccgggatggccgcccccagacggccccggcccgcggccacccccgccatccccgcgcaggctctacgccgctccagctgccctccgaggccttcaagaaaacttgggcgccgccctccgaccgcagccccagccagagcttcccgagcgcggggcagccgcgggccgcccccacccggccgcgactcgggatccgcgggtggcacttacctccccgaggcgccggcggcagcgggaggcgagctctccgcggctcccgttcgagtgcgcggggcacggaggagcgcgcgcctttaagactcttccccgagactccgccaggtggtgtcacgccggcccggccctcgcggctcctcgccccgcggccacccggctcccctgcccatcgcgggcagaacaccagcctcccgctcgcaccctgcgccccgccgctcgg

SEQ ID NO: 669 - DNA, 408 bp, Homo sapiens
cgaagcggggagaatccggctgggctgacggagacgccacaccgcgccaggggagcaggagctttttcggagcgggaggcggggcgccgtgtggctgcgagcgcgcctcttggatgccccggccggcgcgggggtgggtgggcgctcccgccccatccttggccccgggcggccagccgcggtgtgcccggagggctctgcgagggctgtgggtggcgggcgagccccagcggcgtagcagaggaggggcccccgagcgagcgtactagggagaagggggtccgtgcaaatcccaggctgacgaccgcgcacgcgcccctcgggtcaccagccctgtcgctcttggtggggcacaccgaggagaccgccgtggggaaccggggaccggattgcctgacagccgagcgc

SEQ ID NO: 670 - DNA, 3276 bp, Homo sapiens
cgcggcatggtggccctcgcgtgtgtgtgcagcgcctgcaggtgtcccgcccagcgcctcctgcacaacagttgcaggctggacccgagggtctcctctcctggggccccacagtgcccagaggtcccgctagccccagacaccgccccaggctcccctccctttctgacgccgtccactcccttcctctgcggaagggggacacgctcctctgtgccgaggtgccaggccgctgagatctgctgccctggaggaaaagccaggcagggtccctggccttgggcggctaggaaggctccacggctgctggggatagagacgcggggccaggctaagggttcccgccccgtctaaacagcctgccctgggcagggcagggctcctctcccgcgcccgcgcgctctcggctgggcacggtccggctccaggcctgacgggcgcggcctccccactggacgcgtgcgggagggcggcgaggccaaagcgctggggccaggagggcacccgcctagcggctccctacgggagttggggcagaagacgccgcgaccccgcgcgggtaatttctcccgaggcgcgttccagcccgtggcgctgccggcgcagaccccgcgtggggaccggcgaggctaacccctcctgcggcccggggtcggcagagcacgcaaggggccgcgggccgcgtgggtttgggcgcgccgtggtgggcaagcggggccagcggagcgggaacccgcacaccctccgagcggagccgaggacaggcccgtgcgggccgcggggtccctctggcgccaggaagcggcggccgaaggagacaacgagaacgcagccccggctcagggaggcttaaaagctgagatgctgaacgcagacggcgggcgctcgggggctggggggcgggtagaggccgccatttctcaaaaaggtctccatcgagccggcctctgctcccgcccgaggggcggacgcccgatcccggcacccgggactgcccgtgggtccctgctggctggggacccccagcccccggctgcgcgcagggaaaggctgcagaacgcagagaccagagaagccgggggcggcggggaggggtcggggggccacggctgtagcccggccccgcagtctcggagcctcagtttccttctctgtaccacgggagcgtggacggagggatttccgaggctttgaccgctctgatagccccggggcggggcggggcggggcggctgcgccagccctggtcctgagcccccagcccggcgccggaacccggaccgcgatctcgggagccgagccccgcggtccagatgaaggcgcgagtgcgcgggtgccgggtggggtgtctgagcgagagcggagcttctcaggtggacgcccccagccacctccgggacccttcctgctggcctttgggcctgagaagtgggcgcggctggacagacgggaaacagccccccacgcacaggtggacacccggggataccgggcgcgcgcggcgcctggcaaggggaagctgctggagacgcgggcggctgctcccgcggggcccccttccgaagcgccgctgcgaacgtccagccccggcgacgccgcctgcccgcgatcgggccggcgccgcggacaggaaaggctcgatcagctaggtctgcctccgagaagtccccagcgccccgcccgcacggggtggggactgacagtcccccggggacggggccgggtccacagagcccgggagctgggggaggggaggcgccgggggccccgacccgtgggaagtccctgtacccaggctgcccggcggcttctcaatagcacacggacatctaagaaacgcggggcggcccggtgacccccgctctggacttagtggcgccgcgaggccccactccgagccgttgaccaccgggcactcgggtgttgacgacctgggtccttgggcacccagcccggctccaaacgaccccggcccaagggtgttcagtgcagccaggagggccgaaccgaattctatctcccggacgcggtggtttcccgcccgcctggagccccgtcggaggttcggggacaccacgcaggtggtccatcctcgagtccggggccggagcccgacttccttccccctgagctctcggagccttcggggcagcagcgccggcccaggcgggggcgggggaggagggggccgcggcagctcccagaagggcgggggggacgcgagcggaggcagccccggtggcgcgctcgtgagacccccgccgcgccgcgggcccgggccgcggacaattaaagcgggattcctcccccgctgacgtcggcggctcgaggcccctcccgcggcggcataaaaggcgcgggctccgcagcgcaggcggcagtgggggcctgatagcgcggcggtgtggaccgcgcggccgaagagcgcggcgcccagagcgcgggccgctcgcggagccacagcccgagccgggtcccagccggagccgagccccagccgagccgagccgggcccggagcgcccggtgcccgcagccatgccggccggccgcgccgcgcgcacctgtgcgctgctcgccctctgcctcctgggcgccggggcccaggatttcgggccgacgcgcttcatctgcacctcggtgcccgtggacgccgacatgtgcgccgcgtccgtggccgccggcggcgccgaggagctccggagcagcgtgctgcagctccgcgagacggtgctgcagcagaaggagaccatcctgagccagaaggagaccatccgcgagctgaccgccaagctgggccgctgcgagagccagagcacgctggaccccggagccggcgaggcccgggcgggcggcggccgcaagcagcccggctcgggcaagaacaccatgggcgacctgtcccggacaccggccgccgagacgctcagccaactcgggcaaactttgcaatcgctcaaaacccgcctggagaacctcgaggtccgcgcgcgccctcggctccggttccccctccggctcgctcgcccctctgccctcccccaccccgttccctacccggccaggcatcccccgccctcgcctcagccgcgcgggtgcccggccggtgcctccccgcgcctgcgaggccccgcggcggccactcgccccagctccctgccaggccgcccccgcagtcgcccagaggggaccgcgccgcgggccttccagcacggtccccgcgcctcgcctaacggtgtggtttcccccgcccttgcaccccgcagcagtacagccg

SEQ ID NO: 671 - DNA, 1160 bp, Homo sapiens
cgcaggatccgctcctcgatggacgtgagccccaccggcccgctggtgagatcctccacggagcgcgaccatttcagatcctccttaatcgcctcgtccaccaccaagtacttgagctgccggagctgggggctgatgtcggacagtctccgggggctgacgtccggtgacctcctcatgccactgcggtcgcaggcgccacgggcaggtgggtgggcagggggagcatggacagagaggaggggattcgtgaggagcagatcccagggcgagagcaagagcgcggccggggccctccgggggcgagcgccgcggcagagcccgcgctcctcccttcccgccgccactcacccacttccccgggcagctgtccccagtgccctatcctgggcgtctcggggcagtgcgggttggggcgagtggcgagggaaagaatgactgaaacttcccgagcagctccaccgcgcgcgccgcccttccccgagcctcagactgcccagtgtcccagctgcaaagggctaccccggcgctccggcctcccgcccgccggctcgctcacccacgcccggggcgctactcacacggcaatgctcttgcccctgggtgcgccgctgggaaactctcgaatccccataggcaaagacagagtgggaccggcagctcccagacttgaggcggaggggccgcgggccggagctccctgcagccgctagcctgggaagactggagtgcgctgcccaccgagggtctgcgccgcgccggccgccccgggccgctttgtgcgcgcccgcgcggtctgtacccgagcgcctccgcggcgtgcggcacgatgcaggcgcggcggttcagcccggtgactccaggccggcccgcgcgctcgccgcaacgacccggcagccgaggcagcgccgcgccccacgcccgtcaccgtcgccgccgccctagcacaccgcaggcgtgagtctcgccgcgaccgggagagccctcccagctgtgcgctctcgaggcacctggtcgggcggggaggcgtcgggtcggggcgcacaggggccaggcgggggcgctgctgcccacttcccgcctcccgggcgtgcgctccgccccggagcccgcacctcgcgcccgcgctccgcctggaagccttggggcaccggacgcgc

SEQ ID NO: 672 - DNA, 1134 bp, Homo sapiens
cgaggagggcggggcgcccggtccccagtcgcgcggccaccgcctgcccagcctggctggatttgagcccggcccgccgatcgctggccgaggcgcagctgaagcagccccccagccgcggcgcccccactttccaactccacggttcctgcggcgcgggcgcgatgcagctggcccggggtgaaggcaaggcgcggggcgcggggcgcggggcactgggagcgaggcactggcgcgggatgcccggcgcaaggtgcagggcgcgggccgctctctttccgcgtccccccacctcgccaaagtttttccacgatggtccctaccccggctgggtcagccccgtaatcctcgcctgtctcttgtctcctctttcctccccgagccgcggggctcccggggcgcgcggacccccgccaggggccgtgtaggcgcggagccccagccggcctgccttgggtccgaagaaagttgtggcttggagctagtcctccttctacgacccctgggggcgtccttccttctttttgagcccgcgatgggaaggcgctcccaccccatccccggggtctctgagacttcctggcgaggtggggcggcgcggcaggtgcagggctggggagggcctgacagccctggagagtgcccgaccccagtccgccgccgtcttctaggcggattccccagaggcaggtcccagtccccggcgcggggaggcggcgcgcttcagaggggcgcagggtgcgcgggggccgttggccctccgggcacttcccctttgcggtctccccgccctccttcggagctggtgcctgaggtcgctgggacctcagcctggcgtcttctctcgccccgagcgaggcaggtgccgtgggcggccccggctacttctgcatttcgagcgcttactttgcattcagctctaagtcggagagctctggggacagccgagagtgccagtggcctcatagggagactgagggttctgtttcacctcgggcgccgtgtgggtctgggctgtccacagcacctctgcgcctcagtgataggagaagccaagcgcgaggcctctcaacagctgcgtgcactctatttcccaggtatctggaatcccggcgcctagaacgtgtttttcgg

SEQ ID NO: 673 - DNA, 10783 bp, Homo sapiens
cgagccgggacaaaggcttccaacgggagcgggacatttgtctacatttcgctcattgtccgcagcttagcaatcggtttgtatttgtgtttgcccgggtccgaccacccaggacgcgccgacgaggggcttgctctaacctgggccattgtcacccacgtcacatactgggggcgaggcagctagggctgcagaaagccgccgagcggctcggggagaggtgccctcacccagcgctggcaacccgggggcagctggggcgcggcggcgtccgctgcagctgcgcgcgaggaggacccggtgcccgcgcgctcagcttggcccgcgcggaggagcccaggttgtgggaagactagacctggaccccgcaggggtggccttctgtgcccctccccgcccccagacaaagctccttcctgacactcctctggggcgaacgagcatcaggtagccaatctacacccctgcaccccccccccaaaaaagttttaactagaagaaggggtggcaaatgcggcgtggtcttttccaaccccagcgccgaggaggaagtgcaagtcccgggaaagttcagttcccagagccgagagtggctggaaacttcacactaacctgacttaacctggaaacgtggagcgcgtactccgaacgcacccaaggcgtccaaaaagagaccacactaaagaactcgcgtgggagaagaaaactggggagaaaacgaggcatcgtcgggccacccagcgacccccctcccccgcagctttctgggtcttcacccaggctggagacacaacccccacccccacccccgcaatcccgccccgccgccttcccgctgctccacctctagccagaggctggagagggagggggccggagagggagggataatagagggcaggaaagagcagggccgtctgccctttcctccacccggggaaagaggcccgcagagcccagaggcagcagggccagggtccgaccccagacgaagttggagctcctcactcttaccccgccctccccgggaccgcccgcaaagcagaaagtgaactgcgcgtcctccttggccgcagagaggtggaggcggggggttgggggtgggaggtggggggaggcggagtgaaggaaataaatgagtctttagcaaataaagggcggctggaagggggcgggtcgcttggtggtggctctggccggcccggagcggagctctctcctgggttttgggctctctcgcggttaactggaatcaattacttgccttgtcatttctagcactcatccttaagcctcaaccaaaatattgacctaggaggcttacagaagttgggctcttgccatttgaaccggatcttgtttaggcaaccaccaacgatggaaaggagagatttccgcagctcggccttcgccccctcccccttttccaaaggcgccacaaatcgccaattttccggcttgccgggggtgggcgcgcgggggcggggaggtaggaaccggtgaatgttaaagaggattttttccctcctcctggtttctgttttgttttctcccctcctcctccccacccccaccttttttaagatgcaatttgttaaaacggccctttcaagtgtgtggactcgcgagcgacgcggtggccctttgtatgtaaatactgggtttaaaaaaaaaaaggctcgccccgtctttgcaattaattgacacgttacacctctcatcttgctctagagggccgttggctgggagcgcggagctccccaaaacccacaatttcacatctgcaaatactgtcttcatccacttgactcccaagacccgcccacacgtggccaacctttgcgtttttaatgtctcttcccccttttttccacccttctcccgctccctctctcgctccccctccctccctctttctttccctccctccctctctttctccccctctccccgcctccccaggttcgtgagtggagcccagccttatatggactgatcgctcgggcaatggcccattttttcctcgccaccagccgccaccgcgcgccgagcggccgccggagcccgagctgacgccgccttggcacccctcctggagttagaaactaaggccggggcccgcggcgctcggcgcgcaggccgcccggcttcctgcgtccatttccgcgtgctttcaaagaagacagagagaggcactgggttgggcttcatttttttcctccccatccccagtttctttctctttttaaaaataataattatcccaataattaaagccaattcccccctcccctcccccagtccctccccccaactcccccctcccccgcccgccggggcaggggagcgccacgaattgaccaagtgaagctacaactttgcgacataaattttggggtctcgaaccatgtcgctgaccaacacaaagacggggttttcggtcaaggacatcttagacctgccggacaccaacgatgaggagggctctgtggccgaaggtccggaggaagagaacgaggggcccgagccagccaagagggccgggccgctggggcagggcgccctggacgcggtgcagagcctgcccctgaagaaccccttctacgacagcagcgacaacccgtacacgcgctggctggccagcaccgagggccttcagtactcccgtaagtagcaaaacttggctgccgaggccgtggtcccctccattcctgcagccgcagcccgggttggacgctgggagtgaaaggggaaggggccatgtaagcccggaccccctcactcggatccgtagaaagatttttaacacctgtataggatgtcctctgccctcctcttcaagcctccttagttccgggaaagaacttggtctccaaaatttttttcaatgcgagaagttaaggagaaagagggagaagggctatacctcccaggggctggtatatgatgtcaacccggaccgatggctccagccgcagcccccggactccggccgctgggagggactggcctggcgccctggaggtagccagcgagcctcgtccgggtacgggtggagggtggggaggcttcgggtggcccgggtataaatagctcaccctgccccctgcgcgatcatagaggacgctttgtgcagtgcagggggtgtctagaaggcccgaaagcagaaacgaaagcccccaaaaacctgccttaaatggccgagccgatcaatgctgggattgtggggtatttcttttaaaaatctgcccacgtctcgccggagaggaaaccgcttaagggcgccggagcccttaacccgcgatgatcttcagtgccacttccccccccaaattctcacccacactatgtgagccccttgaaaggcgagcccctagcccccactcctacggatttccctctttaccctgggaggtcccgacgtcttcgtcaggcgtagaggaaggcaggggtcatggcaaaggcagcggggctgggctgccaggcgcggaggtccagggtcgcacggaggatccagggtgctccgagtctggtgcaggctgcgcgcggcctccagacgcctgacgcgcttctctctccccctccccccagtgcacggtctggctgccggggcgccccctcaggactcaagctccaagtccccggagccctcggccgacgagtcaccggacaatgacaaggagaccccgggcggcgggggggacgccggcaagaagcgaaagcggcgagtgcttttctccaaggcgcagacctacgagctggagcggcgctttcggcagcagcggtacctgtcggcgcccgagcgcgaacacctggccagcctcatccgcctcacgcccacgcaggtcaagatctggttccagaaccaccgctacaagatgaagcgcgcccgggccgagaaaggtatggaggtgacgcccctgccctcgccgcgccgggtggccgtgcccgtcttggtcagggacggcaaaccatgtcacgcgctcaaagcccaggacctggcagccgccaccttccaggcgggcattcccttttctgcctacagcgcgcagtcgctgcagcacatgcagtacaacgcccagtacagctcggccagcaccccccagtacccgacagcacaccccctggtccaggcccagcagtggacttggtgagcgccgccccaacgagactcgcggccccaggcccaggccccaccccggcggcggtggcggcgaggaggcctcggtccttatggtggttattattattattataattattattatggagtcgagttgactctcggctccactagggaggcgccgggaggttgcctgcgtctccttggagtggcagattccacccacccagctctgcccatgcctctccttctgaaccttgggagagggctgaactctacgccgtgtttacagaatgtttgcgcagcttcgcttctttgcctctccccggggggaccaaaccgtcccagcgttaatgtcgtcacttgaaaacgagaaaaagaccgaccccccacccctgctttcgtgcattttgtaaaatatgtttgtgtgagtagcgatattgtcagccgtcttctaaagcaagtggagaacactttaaaaatacagagaatttcttcctttttttaaaaaaaaataagaaaatgctaaatatttatggccatgtaaacgttctgacaactggtggcagatttcgcttttcgttgtaaatatcggtggtgattgttgccaaaatgaccttcaggaccggcctgtttcccgtctgggtccaactcctttctttgtggcttgtttgggtttgttttttgttttgtttttgtttttgcgttttcccctgctttcttcctttctctttttattttattgtgcaaacatttctcaaatatggaaaagaaaaccctgtaggcagggagccctctgccctgtcctccgggccttcagccccgaacttggagctcagctattcggcgcggttccccaacagcgccgggcgcagaaagctttcgattttttaaataagaattttaataaaaatcctgtgtttaaaaaagaaaaaaagaaaaaatccctgccctcccgtttgtcctactgcgccgggccggaggcctgggcctgggagccgggcccggccgcccgcggggctcccacaggcggttcctctcgggcggggaggccgggggtaccggggccctggggcgggcggggctcccggtgcaggcccctccgaccacaggctgcaccccgcgcctaggattggggcggggaggagaacgctcggcctccggcctgcgagcggtcggccggaagcccagggccgcccaccctcccccgcatctcccctggtctcgcgcgctgtctgaaccccgggcggcagcgtccggctacgggaggaaaagtgacttcgggagccgcaaaggcgaggagagcaaacccccctcgctggcccaaatctatgagtggctccttcagcctgagaagctgttgaagccactacactcgatgactttcactttgttacatttgacttacctcacgctaagaaagtgggtgggtgggggtctgaggttaagactggctgccttctccccactccccactccttttcaaaatctgcgggctggtgctgacctaggagaccgctaaggctgggggtgggaacggtcagggcgcgcgaggctttggcttagggggcttgggggaagtacgcggggttctgggctcgggggagggaggggatactgcagccctccctaggatctttggccccaggaagccagggagcgagaatctttggcaatcccagcaaaccatgcctctcccttcccttacgctcccatcctttccgggcttccaggcctctctccggggactggatcccgggcctccttccctccagcgttcggcggtccgaaccagggtgtgcggtccccccaggtcagcccttgagcgtggaactgggtggattgctaggaagtagaggtttgggggtggggtgagctccccggatgggaagtgggcacacagccccgggcacgcccgggaagggcgcatccatctttccggcggggaacggattccgtcccacccttgttgctggaggaagatctccttggcagatgctggcgcacacttggccacgcgggggagcgtcttaggaagcctggccaactggaggatgagcctttctcctctatctcgcgggtttctaaaaatacttgggactctagctcagagcccagcgggtgctgcagacgctgagggactgaacgtcggcgcatttggaaattgtatctctgttctctccgaagctgcaccatcaaggctggggggttgggtggcagtgaggaggccgggcaaaaggagcggtcccagctgactttctcgctccctgtagttgatgatcaggtttaattcaatatctaaagcaaacatgattatccgtgcgaccaaatctgtgcgtcgatagcactctgcgcagcagcccagggacgcgatgacactttattcccgcgttccacaccgcccctggataattgagggctcggaagtctttctaataccccagtaaaggtcctttcccatctccgggctcatcctcggggaaagggcagtttttctaaatgctaaaaggtctccctttgttctccacactagcttggcaatgtttgggggcttatgtcttactgtttttaaaggccaacgaatttctcccaaatagtttgttgtgcaataattgaacgcccaacctgccctggtactaaccactcaacatccacttgcaacttcccctaatcccaaaatcctcttgggaggaaaggtgagggtttcaagtctcttggagcggagctgtcagaaggcctgaggccattttgacttttccaggccccagggcttccagggtgagaatgatcacaagagaccctcaggtttccagagaggaagggggaagcgtggaaggtcctcaccctggcaggcttccaccacttgctcattgaggacaaatttggagctgtggccaggaccgcgggcctgcaatctgggtgtgcgctcctgtggccggccgggagcccgggaggtggacccggcgcccgcctctctctgtcctcgggtccccatggagtcaataaaagcgcctgcggagccctgtgtggccctaaccccagcgccctgggagcgcacccggcgcggggtccgcttcagcagtctatcttcgcccaatctacagcgggcggtacaaaaccgcacaatgggaaagctgggagccggagatgttagaggcgtgcatattaaaaagggacagagaaaggatcgcggggacagagagaggggaagaaggagaaggggcccgccccccaccccccgccccaccccgcaccattcagcgcgcttatcgccggcagtgaatcccggagtcaggcagaagtctccttggggttttgttgggcctgtcactgggtccctttgtcatccacgggctccatgctggattccatatggccagctgggccgagggagcgcgaggagggacccgcacaaaacctaaattgtgtccggctttcaaaccctgtattgttgtctgtgaaaggaagacgcattaaaaattcgtgctatatctattggggaggaggctggaggaggggagaaaaagccacccctgtctttgatggcttcggagggcgcttgccccgcctaggccccgtgacactgaaagttggatctctctcattctgtctctctctctcaaaatctctctttttctctcttctcataatctcgctctcataatctctttctctactttcataatctctttttctcataatctctctcccttcctcacttctctccttcctctcttctgtctccttgactctaacgctgggatgggagtccgcgaacctgcgtcttcagggtttggctcacttgtgcgcactttgctcactgctgtgtgtgtatcaggaaactaacttctgcctgggagctctgcaccatcggaccgtcctggggctcaggaggcaactcagggtacccagggcctgggtgatgctcggtcccctacgggcttagcggctcctgggtagatgaaaatccaccccctgatttcgcaaccgaccggccccgaagcgcccgcgcgcggagccgcccttccactcaccgcgagaaaggttctgagaggccaagggtgccgctcagtcccgggcccagctagacttgggctgcagccggttccaaggcgacttgcgcccggccggaccacttggttaccaaccccgaagagctaaagacgcgcgcgttcctttgaattatgcgcggggatccatcccactggcctcttggtgcgatgggaaaccacttcagaaacttcttccaacagcgtctctccccatgttggaggagggagatacttcctctttaattttcaatgtctcctgtatcgcgtgcttacaaaattcagtaccagggagacacagcagggcttccaaggaatttgcccattttttgcctcctctaagcggtccaaattggcgcgaggcagtcggaaataatttgggtcatgccttctcccctgcaattgccaggtcaaaactcccataagcagtccccaaataaaccatatgtactaaacaaaaatagtttatgctgagctctgtggaaataaaaactggaacccagatatgttccccacaaagtcactcggcccttaatgagcagaactgagctggtggaaattccgactaatgggaaacttggatgcgccccctttcctatttagtacaacggtcatatttagtagaatcagataatttggtaagagtggaagtcccccttcccaacattccccacctcagatggggaaataacttatttccttacctattgactgttgggcttagttgagacctggtgtgtatttctcgagccttttcaagagcctggtcattgaaaagctaatccaatatttaccgagcataaggacagttctcagacgtatttattaaggcccatcgctaagtgattacttggactgaagacaaaggccaggggagggggcgtctaggcataccagatccttctcatttgggctctccccacccagaaccaggaaaccgggagcgcgcttgtgcgctgctgaagttcccctcccggtgttaagtggcgggcggattagatactgtgctgggcggtatttcaggaaatatgtacttgtggctccctgagaggccaagcgcagtgacactctaaaccgtgtcgatatatcatcttttatccaggatctgcaaataaacccctgatccccccggcgcattatagccgccgctatctcgccaaggaagcgatctgagttttattgctttcaccaacgccccgagacacacacacacacacacacacacacacacacacacactcctctctcgcactctgatttttaaaggctctattttttccctcccgaggcatcgttattaataaagaggcgaataggcctcagcgccgccatccgagcaagcggggaaatgtgggccagcagcccaggcccgcgcgcggatcccgcgtacgctccacgcgccccctcgggccggagaaccgagcgtgtgccgcgtgctgccgccgccaggaggcgcccgagcccagcgttcccgagcgtctctgcgcgcgggtccgggcagagcccgggagccgccggaggcagctgcgcatcagcggactcgcggcccgggtcggagcccggtgagtggtgccaagaggtggcggcgagtcggaaccttggggagagccgcgagtcagacggcggcgggtgcctgggaggtgcgagtcgacctgtgttcggctgtggttttcccgccatgcctcttctcctccacgtgcgtaccaccgcccgtcccagccccggtttccatcgtgtttgggcacagaccacagccgactggtccaggagcgctctggccactgggagggccccaccaggcgccagggcgcgctgtctccgcgatctcagggcccctggcggcgtcggccgcgcgggtggacgcggagagggcggtgctgcgagggcccggagagtgggtgcccgcgtggggaggcggcccgggagcgcgggagcgatgcggaggagggacccggtttggttgcaggtttccggggcgggggttccgggaaggagagaccctcgccttccgcccgccctggatccgggtcccgccggacccccggctcctgccgttcgtcgcctggaagcggggcaggcgcacagtccagacgccagggagagacgcctcgccgacccagaccgtggggtcagggcccgggaggcaagaacgccccacacacagcagggcaccccaggcaaccctcactccgtgctgaggcctcggctagggtgcaaaggtgtccgggaatggaagggacacgagggtgtggacgcctcgcactctactcacgcctggtgccttctgagaggctgggcgtggggcagagggtaggggacaagggggtgacattccttaaggtcctccccccaacaaaagtagggcctgcagttccagcttgattcgttgattgttgggtggaaccgcctcacatcaaaggcatcgtggctccaaacactgtcccctttacttttctaagcccccgcttcaaaaccagctgtcggtgggccggtgagggcgtctgcagtacccaggctttccgcggggcggcgcggttggataagaaaaggcttcccggctggggcgcgcagcgcagctcagacacctgcgggactcgagatgtctccgcga

SEQ ID NO: 674 - DNA, 2194 bp, Homo sapiens
cgggccacaccaccgccaaacacagagcacgcaattcaactaaaaattcgacttcagtttcttcctgtccgcgccagaacggacatcagactgccccccgcccgcctcctagcagctccttttcacttcggctgctgccaggatttcgcgacctagacccctctttgaagaccacttccgatccccgacgcggcagcccttgaggtcgcagcctagcacggagaagttggccggctctgggggctatgaggctgctcaccccacaggcgcaggtctacgcagcacacacaccacctccttctttggactcagaccaaacacgctgggctgtaggagggagacggacagatacacggactcgcgcgcgcacgcctcaccaactgattccaaccagaaaacggagccactgtgtaacgcccagcccccctcccctcgacacccccaatcagccaagccttcggccggtgtctgctgcactaaacaccaggacgtggccagggaaggcgcaggcatcggtccgagccaggagcgccgcggcgccagcgcatctgacgtcgcaggaggactgtgcgcacctgaagtctgggtgccaagcgcccaagcctctgcgtgcaacgaaacccccaaaggaaaacaggactaccagaagaccccttcctctcgtctttcagaaacgccaagcggcccctctggccgcctcctcaaagctcggctgccagagccactctagtagggtcttgcaaaaagcgcatagggacaaagccccttccctaagaaaagtgcccaactcatccagtgagccattccttcctcctcactgcccagagagtgcacatgaagaggcagaaatcacgactaggaaaaagcgagattcaaattggaaccaaaaaagcgtatgtgctcgctcccatctcggcgccagggctgtggctcccagggctgcaggctgtcgcggctgccaggggccagacagcttttgaaggcaggtcttgtcctggctagaggaaagaggctccaggagtctctgcttccgccacggtcgcccgtcgggattccccatcccaagcgcgcttgcaccttgcctgccgctccgctcggagaattagtctgtttcccttcctactcccaaacagacctaggtccccagctccgtggccgcccggctcaccagccctggctggtctccttcgggtcactccgaggggcagcccgaacccgcagagccttggcccgccgcgcgccctcatggccctgctgggcagcctggctccgctacgctctcagttctcggtctcaccagctcccatcgaattcgcacagcagccccttcgcgtctcccggggtggcaaggcaccaaggtgcagcccaggccagcatcgaccccttcctgggcattttctctgccggctcagctccccctcccgccctgcgaccccgtgtctcccaagtctcgtcgcggcgaccacccggacttaccgcgggcgccacgccgccgccgggtctgcgcgctccgaggcggagccaggactaggacacccgccagcgcagggcagcctccagctcccgccgccagctcgcggcccctgccgcgaccccgcccactgcgggcccctccgcccgcccccgcggccgggaggtctggacttacctccgggacaaggtgacccggcaagtgcgcccaagcggccgcccgcgactctcccgagcgagcgagcgtgcggggcggtgcggcgcccgcctctgctcctccgctgccaggctctctcctcctctgccctcccctcagcgccgctctgctccccacgcctctccccgccctgcgctctccgcctgcgcccccggctgccccgagcgccgggcgcggggcagcggcggcagcccgagcggcggggagtcgggagctgcggcgccggggcggagcccaaccctctcggcccccgggagaggaaggggtgcggggagactctcgtcgcgctcgcctggccggcaggctgggcgaggggcgccctggggcgagccgctcctcttcgcttgccgagcctgccgacgcgcgtgctggaggcagcgggcgcgggccccgggggaggagggcagggaagagaaggagggcgcagcccgcgcgaaggtggccaccaactttggcccagaccagggaggccctagcgggggatcgcgtccagatggtggcccgcgg

SEQ ID NO: 675 - DNA, 284 bp, Homo sapiens
cgagagtagcgcacgccagcgccgcctcctagactcgagcagagccggagagagagacgagagggtgggaggtcccggagtaacttctctccaggctgaagggcggcgaggcatagtcccgagaagtcaccaaggccatctggagactcctggctttctgaactttgcgcgttaagccgggacagctgctttgctgcccggagagtagtccgcgccaggaagagagcaacgaggaaaggagagggactctggcgtcccggcaggcgagaggcgaggctgagcga

SEQ ID NO: 676 - DNA, 603 bp, Homo sapiens
cgccctgctcggctgatgagcagaattgccgggacatgcgcgttccggccgaaggggggtaatttccgaactccgggaattcgttgtgtgaagtaggccactcctagggacgcgcggggagcccggtcctcgcgccatgtcgcggcgcaagcaggccaagccccagcacctcaactccgaggagccgcggcctgcgcgccgggagtgtgcggaggtggccccgcaggtggcgggggagccgggtgagtagcgccgctggagccccgcccgggggctgggggccggtgctcagaggttctccggacccgcgcgggtacgaggaccgggcaggggacctgaaagggcgggcgaagcgtccggcgcagagtcctgggactcggacctgggcgtccccgccccccgcctttgtaaattacactctcctggagtccaccgtccccttccccgcctggattcctctagccactcctctcaagagctagtcaacgagtttgcctcccaaacacgctggaaggatgctcagaggacccctcagaggctgttttcgggatgcgcgggcacccgagtctccggcctccttggcactgggcttcggctgcgcgc

SEQ ID NO: 677 - DNA, 6511 bp, Homo sapiens
cgtagggtgaacaggtccggtcaggagccgcagcgccgctcacctgcacctcgtccatctggtgaggcatgtcgtggagccccaggttctcggccaggcccgcggcatccagggcgtgtgcgtggggcagcagcaggtcggagcggcggtaggcatccctgcgggcgctcaccgcgcccgcctccagcccggagaggtggggcagtaggccggccgggcgcccgtggtgcgagggcagccccgctccctcctggctctggcggccgggccaggcctgctgctggctgcctgtgggcgccggctggtgcagggggttgatggcggcggcgtacgcttcccccagatgcgagtaggggtcggccgactgggagtaggccagctgctggtagggagggggaaagtagggtggcggctgatattcggcgactccagtgtgggagaggggtggcgcggggctgtagaggtgctgcccggcggaggagaggtgggggacccgcggattcccattgctgctcccgtcgtggcgatcctggagggaaaaaaaaaaacaggagaccccgttagtgcgaaaccccgctactgcgaactggccggcatcgccgggctacgcagagggccccgggggaccaaccgcaccccgcccggcggggcttgcccagggtcggaaggtacccgggggcaatgcgccccgaggatttcgttgtaagcaaagagtgcggggagggaggagagtctggtgaaagacctgggggaacgagttctcaaagcccggcggcgaaggtctaggcgctgctcccaagcccgaggcgcttggaggcgccaagtccgaaccctgggtcttgggccagaaaagtccgtggccggagcccggggcgaaggagccagagcccggggcgaaggagccggacgcccggtgcagagctatctcgtggagcccgcccatgacgcagggactgctggaggtggcagcgcggcaggcgcggatagagtgcgcggcgcgggaaatgcgcacctcccccgcccccgggaccctcccttccacgccctcgggacaaagacctccgagcgggcggcgctcggaaagcagggcccgccaccctgcgccgccctgggaagtgaagagggagcgcgcgcacagggcggccctccctgctggccgggcccagccgaggggagtaataagtgggggcgccctgcactgccaagggcagtgttctcgcacgtcggggcgcagagggggcatgaagaaccctggaaattgggcagccttgcccgcgcacgttccctcgcccctgggcggcccgactcagtttctaaaggatgcgtccccatctgcccaggggtctcggggcgccgggaacctggaggaacatggcgctgtcgcctcctggcggaagcgcccgggcctgcgggcaggggcagccctccagggcccggaggcgcagtgaactcccgcgagtccgtagcccgagctccgcgctcccggcgcccctgagctcgcctagcgctgcctgcgtcttcttcctcttcccgctcgccgcctccttcttccctcccactctccgaaactctagctcaacctgtccgacaggctggagcactcgcgagctcttacggccccatctggcctcgggcacccccaccaccactccccagcccccacttcttttgaaagccaaacttcggttgttttcgtgcttccccgaggaggtagcggggcaggtgacaagccggccttggaggagtgtccgccaaggtgtcgctagcaggtagcctcatctgacccctttggacagagacttcgtgcgtaaaagccacgtctgagggttgcagacggggcacttttccgagaaaacgggaagcagggctgtttgccgcttaggaaagcgcccggtaagctgtgtgggtgggatttgccattctctttccaggcctcgttcccgaggggaggctatttaggaaaaggccctatacaggaaaggggccccgcagaaatggactaaggggtgtccggagaagtggatcccgtcccaccgagaggccagggctcctatgccctcgtccccgacctcggtccagtggcccctgcctcccggactgtcctcggcggggcggggctgcaccccggagccccagctcacctcgcagtcctcttcgtacttgacattatcggttattttccacaacatggcgtccggcgtcccccaaaacagtcgccagttaaatccaggatccccccagcccccaagcggtaaatccaaaatcggggtcacggtgaccaggcgtctgccgccgcccccgccgcgcgcgggccttgctgtccgggtcactggacacgcatcggcggctctgcgagcgtagatgctgccgccgcgagtgtcaagaccgctccgcggacggggaaagccgcgcccgaacagtgtgtcctggcgatagccgggggacccgagcgccttaatgagaaggaaattatcataactcctccccgggggccggcgcggaggcccaggcgccgggcggggcggcccccagccagtcccagcctagctccgccccgcacccgggcctggcgcagcgccgagccccacgctgtgagggacgaagcgcggagtcagtgggcggtgcctcgttgacagccgaagacctgcgaggcctgggtcccccgacgcgccttccttctgtcacctccaccgtaaacacacctgagattggcagagctgggggaagggatccaaatactgaaacccacccctctttcgcctaaacggccttcactcgttcctccaaaagacggatgtcacctggagttaagaaactgcgcatttggggagcgactcaacaaccggggtctcctcatctcctaaaaacacatcccatcccacctacaccccactgaggcttaaggtctgagctgggatcatgcagctggagccccagtgcgccagagacgcccagttccctccgtgggcacagcgcggtcccggcccccgggcgggaggagagaggaagggactcctggggagtctgccccaagggccgcagaggcagcagacggtcctacccgcccaggagttgcggacagcggcgtctcgccgctgtcgcccgaagtggcatctcccgcggctggctgaggccagggggaacccgcgcgcactggaccagcccagcggcccggccctgccctgccctgcggaacgccggctctgcagctgcctctggcgggccggtcactcagaagcctctactcgccctgggaaagaagcgccgggcaggaataaaacccgagcgccacgggtaaggtgagggtgaggaggtgcaggaagttgggagagagcctgcagagagctctcgactggagaggtagacacccaggtcccacatgtttagacagaaaacgaaacttccttccacacaaacgctgcttccctctccccttcggtacttgccacccaaacttgaaagcaaagtgcaatactaatttttaaaatttaaactaacgaaattctttggcccagttattatgcagcaattgactttcattgtaaggggaacatcgctaattctcgagggcgtatttgttgggacgccccaactggctccctgggctggatttaaacattctgtggggattagaggacaagactatttctatttgatactgaatacgattttgcaataatcaatgcctatcagtacggtgtccgcacctgcagtagacatgactctcccatccacggaatggcggcatccactgcctcgctgttccttctcgggttcgtttgaactttagcatttatttagacccaggtgggcctaaaagaaaataataataataggcgtcctccaagggaaactttcccccggccttagacagcagccaaatcccaggtgattttccgaccggacgcgggaacaaaatctggaagttgaaaccactgagacttttcggccaagcatatctgcagggctttgcactaaggagaacagtgcataaaaagacacacaggaccctgacacttcggtcccaaaacaggcttctgggggtaaaataagttaccgcagaagcagcgctcctggtattagcggcgggggagggggacacctgccagaagcagaaattagacccaggcccgcaggcactccagagcacaggtccaggaagatgggtcctagactcgccagaggtgcggcgcctctttcgggcgcctgggactccctgacgggtgccgctgggctgtccgacattctgggccttctagccctcggttttattctctgacccggcctgaggtgcagcttgaacaagctgtcttgtctgtgctggcaagtttacctcctgcacgctggggcccggaatgggcaagaaggtgctcatcccccatcccaggccctggctctcctttcccacagcaacactagccaaagctgcccggaggaaccgatatgcctccccgcctgggagcgtctacgcaggaggcgaagggagccgatgggcactgagggctcgcgcagcaccgtgccgtgggcccaaaggacccagaggatccggaaccgcttggcaaaggccattcattcccaaggagcttccctggaccccggcgctgccctctttccaatgggtaagcgttcgaactggagcgcaacctccgcgccctctgtacggaaggcagctagaacaaatcctctgtcttctcggcacgggagacccttccccaatacgcacattctcggcttctgggccggcacccaggcacgcgcgcgcccttgtgaggaagcctcaacccttccttgacttcaacttttctgctcagcagagccgggaaccgaaggctccagcatccaagacagcctccctccaacgtccccgccccttgcccacgtgaagacgcggactgcgtggccgcgctcaagacagccggcaccggcagaaggggacccctctggaaccccggaggcctcgcagccgcctggagaagaggatggaaggttgtcgggggttcccctctaccgccccctagggagcctaaactcacttactccctggaagccctggacccacgcccctatgaaaccgcaaaccaggcctctgcaacagcgggagcgccccaacagcgcgccacttccaaagaggcgcgaggtggtgcctttggaaacagggctcccggccccaggcctgagtcatccgccacccctgcccccaccccagacggaagaaggcggccaggcgggtagagcaagattcgggcagatctgcgactcctcttcccgccccagggaggggactcccgagcagaagatggaggcccccgagcgctttcgcagactccgcgccacgcgccggacgtttgtcccgcctctcgggacaacgtgagcgccggtagggacctcagtaagtggcagacccgccaggatcaagcaaggtggaaaggccggggcctgcggcaaacccaggaggagggggcattcacgcccgccaccctcccttcgcggcactggcacccactggaccgacactggcgtcaaagggcaccctgaagtatctatgtccagtaagggcatgccctggggcaccacagacatcaagtcacagccactccaaaataattacaaaaatgattatcgtaaataacagattgctttaatagggcgcgaagcggccgccgcatacagacgcctctggtctcagtcccaccagattcagttcactgctcgcttctttgcgctccgcgtcaggccgcatgctcttcgtttagaaccttttgagccttaactcttcctctcaaacaactccttttttcaaacaggcaaagtgaggcgaggagctgaggggctcacaggttcccaagcttccgaggagggcccgggtccacgtcagtcccggcccgccaaacgagacttcgtgggcacagtctctaacctgacaaccacctgtcccatttcacagcaggcaaaagtgaatttttagtcgcccaactacctgaaagccacaaaggtgcctagggttgaaggccactttcctagcggttctactagggagcccgttagagacatgcctgactctccccctgccctgccccgggggggacccccgcccgccggaggcctcacacgcttggccgtgggatggtagactcctgtcacctctccactaacatcccggagcccatccgtacgcaccctaaccgctcggagcgcaggcccgaggactaaggcggtagcctcgtgtcccctgaggccttctccgctccgtgttctgggtcgccatacacttcccggctaagcccggcgcctttaactcagaacttggtcgcctccaggcgtggagcaggccactgttgccagacgctgcgcggacccgtcttcctgcgccagtactgggcgacaggcagcccgggcagcacccaggagccaccctgcacggccccaggcgcccgtcccacccagcgccacccctcgcccttcgcagcgagtcctcccgcagcctctcctctctgctagcccccggggtcgc

SEQ ID NO: 678 - DNA, 1560 bp, Homo sapiens
cgttctccaaccgaaccctccctcctgggaaccgcagcccagcgcggtaactgagttaccgcaaccgggcggtggggaggaagggtggtccaggaaaccggcgagggagaaaagcggtggaagggagagtcttctccctggagcggccccagcagtacaaagtgctggtcacagcgccccttccgcccctagattgacgagcagtggcgtggagccagcgcggaggctgccccctccccctcccgagcccgcagcgcggagcgcggtttagcaccaacggagccgggggcggcgtctttgggatggaaaagggccaaaggggaggagtggggtgggggtgggggtttcactggtccactataaaaggaccgctcggctgcccggttcttgcactcgctggaaagcggctccgagccaggggctattgcaaagccagggtgcgctaccggacggagaggggagagccctgagcagagtgagcaacatcgcagccaaggcggaggccgaagaggggcgccaggcaccaatctccgcgttgcctcagccccggaggcgccccagagcgcttcttgtcccagcagagccactctgcctgcgcctgcctctcagtgtctccaactttgcgctggaagaaaaacttcccgcgcgccggcagaactgcagcgcctccttttagtgactccgggagcttcggctgtagccggctctgcgcgcccttccaacgaataatagaaattgttaattttaacaatccagagcaggccaacgaggctttgctctcccgacccgaactaaaggtccctcgctccgtgcgctgctacgagcggtgtctcctggggctccaatgcagcgagctgtgcccgaggggttcggaaggcgcaagctgggcagcgacatggggaacgcggagcgggctccggggtctcggagctttgggccagtacccacgctgctgctgctcgccgcggcgctactggccgtgtcggacgcactcgggcgcccctccgaggaggacgaggagctagtggtgccggagctggagcgcgccccgggacacgggaccacgcgcctccgcctgcacgcctttgaccagcagctggatctggagctgcggcccgacagcagctttttggcgcccggcttcacgctccagaacgtggggcgcaaatccgggtccgagacgccgcttccggaaaccgacctggcgcactgcttctactccggcaccgtgaatggcgatcccagctcggctgccgccctcagcctctgcgagggcgtgcgcggcgccttctacctgctgggggaggcgtatttcatccagccgctgcccgccgccagcgagcgcctcgccaccgccgccccaggggagaagccgccggcaccactacagttccacctcctgcggcggaatcggcagggcgacgtcggcggcacgtgcggggtcgtggacgacgagccccggccgactgggaaagcggagaccgaagacgaggacgaagggactgagggcgaggacgaaggggctcagtggtcgccgcaggacccggcactgcaaggcgt

SEQ ID NO: 679 - DNA, 600 bp, Homo sapiens
cgccggcggtggagggaagcctcgccagggggcgctgaaggcccgcaggttctgcgaccgccctccctcgcagggcgccgccctcgcctcgcccaccctgcctcgcgctaggcgccgaaggggtagccaggtaggaagacacccgctaccgcctgcttcagtgtccggatctaaagggaagaaaccaaggtccccaggacacccagctgagtggcggaggtcgaactcgaactcgggaccgaggcagagggcgtcccggcgggtggtggaggggcacgcggcgtgcaagtccccaggcgtccccattcctcccatccccggcccaatcctcaagaatgtgcgggagccggggccggaagcgactgcccgcgtccccaaatcggccagacgctggggcgcagggcgggcggagcgggcctagcttttccttatatggcccggccccgcggggaggagcccggctcgggacgcccccgttcttgccacgaggccagcgggggccgggccggcgcgcggggcgcagtaatggcgggcgccgggtgctggaggagccgctcccggggtcggaaagacttcgagaggcaccgatcccgagaccgg

SEQ ID NO: 680 - DNA, 1021 bp, Homo sapiens
cgtcggctacaaactgtagcctgggaacgctccagccgtatttcagctcgccttcggggatcgccgcctccgaagcgcaacaacaagcaatgcagtctgtccacctaccttcgcacagactctcagcccctcccgcctctcagcagaaacgcccaacagaaccgttaggaccagcgagcacgcgcaccttagccggccccgcccaacaggcccgaggcggagaaaccgccctagcagctctctcgccccgccacgtgcaggcggcggttgctgcggaggcgcagcgggctggcgtggctccctggagcgcgaggcgcgccctgccccaaggcctgtatgactgtcgcccgcgcgctcttctcctcttccaccggctcccgacgcgcggagccctccgcgctgggccctctgcagcccagggatggggttgagtggcgcttctccgcctggtgccgccgccgggcccacagcccgacttcgccactgcgtcgcccccgggtccgcgctgatgggcgcgaggcggaaggactggatccggggttgccaccgctgcagccagagcaccacttgcaggtggcagctgcagctcgggctccggctggggctggcggggctcacctgggatggcctcctggtccctgagtgcgccgcctatccggccggagggtgcacgcctcctgcaacccgggccgaagcccatgcccagcgctcctgctgcagactgcctgacttgccgctgccccgctggccccggggtccgcacggctggaggcgcagtcctggtcggggattcccaatcctcggcgacccctggtccgtgtgctggtggcggctgcagctgcagcgccggtgggctgacgtggcttcccggagctgcggcccgccgcgcccaagggccccacaggctgcgccgcccttgccagctgctcttgacccctgccctgagcgcaggacctggggcttggcactctgcagccacagggatgaggctaagcgccggttctcggcctcgtggcgccgc

SEQ ID NO: 681 - DNA, 1281 bp, Homo sapiens
cgcggtgccggcgcgccagcagcccgcggccaaggccacctgctcccagggccccggcacctctgcggggaggcggcaggcagaggacgcgcgcgcagtcgcgcaggagccctcaggcgagtgggggaagcatcgcaagagacgcggacctggagcgcggtcactgcgttaccgcagcgacctgggttacctaagccggcgggactgagaggccgctgcgcgtgggcaggggctcagattgcgcccgcggtgcctgtcccggcccccaccccggaacgattgcagccctgcggggctcgccgcccacaccgcgctgaggacgctgcccaagccaggcgcccgcccccgcccgcggtctcagccgctcgcagcgcgccgcccccagacgcgcgtggctgctggcgagggctgagaccgcgctcccgccggccagttcccagcagcagcgcatcctccctgctccgcgccttcgctccggacccgcgtcgtcgcagccccgcggtgatgagccccgagccggtcccgccgccgccgccgccccagtgtcctggctgcgaccgcgcggagccgatcgcccagcgcttagaggagggcgacgaggccttccgcgcgggcgactacgagatggcagccgagctctttcgctccatgctagccgggctggcgcagccggaccgcggcctgtgcctgaggctgggggacgcgctggcccgcgccggccgcctccccgaagccctgggcgcgttccgcggcgccgcgcggctcggggcgctgcggccggaggagctggaagagctggcgggcggcctggtgcgcgccgtgggcctgcgcgaccggccgctgtccgcggagaacccgggcggcgagcccgaggcgcccggcgagggagggccggccccggagccccgcgcgccccgcgacctgctcggctgcccgcgctgccggcggctgctgcataagccggtgacgctgccctgcgggctcacagtctgcaagcgctgcgtggagccagggcccgcgcggccgcaggtgcggcgcgtgaacgtggtgctgagcggcctgctggagaagtgcttcccggccgagtgccggctgcgcaggctggcaggccaggcgcggagcctgcagcgccagcagcagccggaggccgcgctgctcaggtgcgaccaggccctggagctgggtgagtcggctgcggggcgggtccgcctcccctacacctgtccggcccagcagcggggtggggagctggccggtgggcccgaggctttgggctttcga

SEQ ID NO: 682 - DNA, 2029 bp, Homo sapiens
cgcgaaaagccgagtcgctgctggagcctagccgcgtgcgctccctctatcccacgctagcaataagctgggagggtgtccgcctccagcagccttcgcagcgcactccgaacaaagatccccagtcctcctaccccagcgcttgggtcccgcgggtccacagttaatccctgacctaagtgcagctctctctgcccggagttcctaattgatgcaaacgtgagcgcacctgcacccggctcagcgcagcctccctcctcctcctcctcctcctcgccagggtgtctcggcgctcccgaccctccaactttggaaaaagagcgacaccgaagtcccaatcaccccagatcagggacagagacgagatggggatccacgacggtacggttatgctacagatttctaaagaccaaaacaaaaaggggttggcgggtgtagacggacgggaaagagacaggaataaccctcagcccacgcagggcacctcatctgtgcagacgcgacacatccaaacccaacacatcaccaaagccagcgccttcccggctccacttaatcgttaatgcctcgccgctccccaagctccgttccgctcagcagactacggatgtctgggacactcttcccccatccccacctcacaaacacacacccgtctcctcaaaagaaacaagaaagcagagggaaaaccccgtccgcctaaaggtcattcgcctgctcgggtcgctttggccagcgagcgccccggctataggaggacggggctcgaacccggtgagcggccgtcaggagcgcagcagatttcttcagcgtgcgttaatggggaaccaagaggccccattccttggtcccggccgcctctccctccctcggtgggccgcccgccggggttccccggggcaccttcagcctttacctctctgcccccttccccgcggctctccaccttgcgcatcctctcgccgggccccggagcgcacgcagaggctctaacttcccgcagagtccgtggagaagcaggagagcctggaactggggcggggcgggggagggtgagaagagggaggcgcgggagcccagcctgggaagcgggaggcgggcggagcgcgcactggagccacccctcccgggagggcctggccgcggctgccgactctcacctggtccgccggctgcgcctggctcgccctggcccccggggtgggctgcggctcctgcttcgcggccgtcatcgccggcggcccgcgctggcgctcgcttcctcgcgggcgcttcagactcggggaccgtcacttggcagcgttcgcaggtcacgggcgcccgtcgctcccggaatcggcggaagggacggggtggggggagcggaggggcggggaggggaagaagagcggcaccgggcgggctccccgtcgtagggtccctccctcggccaccgcagaccctctgactccccgctctccccgccccccgccacccaaagcgcagcgagccgcggcggcgaggcgagaccaagcggcaagttagtgcagcggcgagcggcggggccccggcccctgaccgagctgcggcgacgcctcgtgccttcttcccgcagtccgcgccccccaccgcccgcccccgggggctccccgcgcggtgctcagcgcgccaggtggagcagccgggcgccgcgctccggcctctcttcggcaaccgcagccggggggggggagagcccggagcggcgcgagagcccccaacccgcgcgcccacggccgccggcttccgcggttaccccgccccccgcaggcttccgctaaaacccggagaagcggagcgcgcccgtgcgaagcactgggtggctccagctccgccactgcgcgcgctccagcgccccagaaggcagggggcagcccggggaccggggtcccggagccccgtgggaggcgggcaacacctgtcgggacccgagggcgtgtctgagattgtggcctgaggtgctgcgccttccgatccggggcagcgggcgtcctgtagctgcgccttccga

SEQ ID NO: 683 - DNA, 1793 bp, Homo sapiens
cgctcaaaagcggagaaggcggagtcccaggcccagccggcggtaccgctgggaagtgagggcgccttggacggcgagggcaactcttatcagtttgactgtctgaaatgcagcacggcgctaggcgctctccagacctccctgtgactccaacaggctgtgaccttggcgtgggggtctggaatacgtgtgggcgctggtgcgggggagagggaatggcgacgcggaagagcaggacagacgcggagggtcagagagcagctttattaagcaagctggtggagggctgtgggtcccaccacccccgggctcggcgccagggcggaaggtccgggggtgccgttcaggccacgtcgacgcgagcgaagctctggtccatgcccaggctgttctccacgtacacctcgtacttgccgctgtcctgaggcgtggcccggcgaatggtcagcgtcgtggtggtgctgccgatctcgaagaacaccctgcggaagggcggcggggaggagggcggagccgtggtcagtacacgggcgcactgggcggggctccttagccagctctgttcctcgctgcccagtccccgcccccgtcactccagccagatttctgggctcagtcccacccaggttccagccccaggccctggccgtgccgcaggtcccggccctcgcctgtcatcctcctcgatgtcctccccgtccttggtccagcctacgtcgggcgcaggctctcccaggatctccgcagtcagcgtcacggtggtgcctttgcgcgccttagtgttgtcgggtcccttttgaatcttcgtcgggactagcggaaggaaaggggagcgaaaccccgtgaaggacccggagatgaggcagggcatcacctcaccggctaatacccggcactaaatacagatgcatttaaactcgcagtgtgacgttgagcaaatcattagcctctctggtttcatctccttggctgttaaagggacttatccctgcctctcctacttctcggggtcgaatagaggatcaagagagataaggcgggcgaaagcccctgaatgttcacacatctcgcggtgcctcagagaccgctccgggtagtggaaattgccagagttgggagccagaagacccgggtccaaccctggctctgcctctggcttgctgtgtgaccttggggacccggagccgcgtgatggaagtccacagctgactgctcagcccgggtggagctggatcccgaggtagggaaggacgcacttggctggcgcggcgatgcgccccaggccgtgcccagagctgggctggcggggaccctgtagctaggcccagaggtaaacacgcgcagctggaccgggctgcgggctctggctgagtggtgctggtctgcgccctggcgctgcgcccggggcgcgcgtaccttccacgaggatgcgcgccgagtcggagcactggccgaaggggttggtgacgttgatgctgtactggcccaggtctgccagctcgccgtcgcgcaccaccagtgccaccacgtcagggtcctcgaagacgtagcggtacttgggaccgtcacgtagctccttgccgtccttactccagcggatgaatgggtccgggaaagccgaaatgcggcaagtgagcttggccgcgctgccttcgatcagcaccacgtccttcagcggctccagcacccgcggcggccccttctcgcgcagctccttccgggacctacccgcgggccgagtcagggcccagagttcctaagacaggcccggccacagcccttaccgcgagcgc

SEQ ID NO: 684 - DNA, 2697 bp, Homo sapiens
cggttagtgaaggtgcgctctgcgccagggactgtgccggcagacacaggcactactgacaccgcccccagcccttcggaggagtcctcggctcctcatctccagctccagcccctttccagccggctggtgggcggctgggagtggggacactggatcggaggggacccttcacgggagtactcgctgccctcactcgtctcggaacgcggctggacccggagtccccgaccgcagcccgcgcacgacccccgggagcctgtctccgcggccgccgacccacgtccgcgctgccgccccactgccaggtggcccgagagatgcaggaggaaggaggggcgcgcggggcgggcggaggagggtggagccgccggcgcgccccctccctcgggccggcaggcgggcggcgcggcgggctcggcgcggcggcagaggaggcggcgggcgctgggagacaccggacgcccgctcggctgcgctgcggctcaggcccccgctcgggcccgacccgctcggtcaccgccggctcgggcgcgcacctgccgggtaagtggcgcccgagtccctgccgctgaggccaccaccgcggccacttccgtcgccgccgccgccactgcgcggagcctcccggctttgtctgcgtcctctcggctgcggctccggctgcggctgcggctgcggctcccgggctcggctctcgggctccgcggactgcgccgcacggcgccggggctcgggggtcgccagccagctcgctccccgccgggggtgaaacttcgcccaagtttgggttctggggagaacctgttgaagccaggagtggctcggggcggggacagagatggtgggagtggggggagggaacccgtctcgggttctccatcagggccgtccagtgggtgggttgtgtgtccgccaccctggggcgttggcgcgcgcccctagggaaggggcgagtgggccgtcgggccaccgagcagaaggagccagggagcggggttggcgtggtcgatcccgcggacttccgcgaggacaaagtttggttctttggccgctttgcggagcgtctgtctgggtccagcgcggagagctgaaagtgtcgcatagacgcgcccctgaccgcacctcctcactccagcctccgcttcttcccccactccacccggccttggctggggcaggtcgtggaagagaaaggcgaaggggaagagggacgacctttcaatgaaggcccactacgtgccaggccccttgcctggcgcctcttgcttccaataagagccctcccaaccctgcggccctcaagtgtgtgcagggaggggacaggggggaagactccactgtgcacccgggggtggtggccccgccgaaccctcatagtccctggtttccgcagtgaatgaggcccgcggctggggcctctgcacccaggcctgtgtccctcctcgcggtgaccctgagccccatccggctgcggcgcctcctgagcctgcttccgcccttcccgcagctgcggccccagggccatgcggaggcccacgaggaggccggcggccacgcgcatcccgtagcccaggtggcccaggtctgcaccgcggcggcctcggcgccatggagcccccgtattcgctgacggcgcactacgatgagttccaagaggtcaagtacgtgagccgctgcggcgcggggggcgcgcgcggggcctccctgcccccgggcttcccgttgggcgctgcgcgcagcgccaccggggcccggtccgggctgccgcgctggaaccggcgcgaggtgtgcctgctgtcggggctggtgttcgccgccggcctctgcgccattctggcggctatgctggccctcaagtacctgggcccggtcgcggccggcggcggcgcctgtcccgagggctgccctgagcgcaaggccttcgcgcgcgccgctcgcttcctggccgccaacctggacgccagcatcgacccatgccaggacttctactcgttcgcctgcggcggttggctgcggcgccacgccatccccgacgacaagctcacctatggcaccatcgcggccatcggcgagcaaaacgaggagcgcctacggcgcctgctggcgcggcccgggggtgggcctggcggcgcggcccagcgcaaggtgcgcgccttcttccgctcgtgcctcgacatgcgcgagatcgagcgactgggcccgcgacccatgctagaggtcatcgaggactgcgggggctgggacctgggcggcgcggaggagcgtccgggggtcgcggcgcgatgggacctcaaccggctgctgtacaaggcgcagggcgtgtacagcgccgccgcgctcttctcgctcacggtcagcctggacgacaggaactcctcgcgctacgtcatccgcgtgagtgcgccccctgagcgccctgccagcggccgcggatccggggcgcagtggccttgcccaggggtccctgcgcgcgggaggcgggtgcgtgagaggagaggagggaagagacgagcaggagaggggaggggaggggagcgcacagaggcagagcgcgggaggagggcgcaagtaatttccctggggtaattgcggtgtttagaggagccgcgggagccgcaatttcccagccctctggcaggcagtgagggccaggagggagaggcgcgccggcgggctgggttgacgtctccgcga

SEQ ID NO: 685 - DNA, 1384 bp, Homo sapiens
cggaagggacccgccggctgcgcctcgctcaggctggccggggccggtgtgaccgtgtgaccccgtgcacactgcgctcgggttttcgtgaatgacagcagcctgcaactcccagccggagagcagcggtggccaccgccgggcggaaagggttacaagccagaatgcaaagcgatttcgccccgggtgtgggggaccccgggtccccggccacctccgaggccgggcgtgctctgctcgccttcctccgccctgggcgccggggcgatcctaccttgcgctccaagctgggggttctccatgttcgtcgccgccgagtcccccgccgccgaggcgctggccgcggctcccgggcccgggccggggccgccgccgccgctcagttccgccagtctccggttggtggccgtgagttcggctcgcaggttggtcacctcctggctggccgactggaccgccccatcgatgcggagcgcgagctgcttattgtcttccatcatgctcaggattttggcctgggggcgagagaggtgacaaagagctgcatgatgcgcggggggcgcgcggccgggcacccccggctctacctgttgtgtcctccgcggcccggcttcgcccgcgccccgacccccaggcaccggcagcgccggttcctccggcacaggaatgacagcggcgcctccagccctagccgcggcggtggcgaggcggcggggggaggaggcggaggagaaaaaagaggaggagaaggaggaggaggagcagcgatcgccgagaccccggcgggcgggcgccgagagctgctccaagaaggacaccgcgcgccaccaggcactctttaaatggagcctaccattcgccgccggctcgggagggggtctcggtcggaggctgggggcacccttggcctcccgcgcccccgtacttcggagacacaccccccgggggggcggaggcggcggacggcagtcgggagggggccaaggtggcgcccctggcgaggggcaggggtcgcctggaccgaggccggccctctgtcccctcccttgagcggtggggcagcccccgccctggagaactggtgccccgagccgtgctaaggttggggaggtgctgggtgctcggaagagagggtgcttggaaagggggcctcagaggggagccggggtggatctccatggaagggagacgcttgcgccagctcaggagtggagttcgtgctccaccggttccttaaactgcgagtacgaaatccccagaggggagctgagctggtgccccgcgtgcctctcactctccaccccccacccgcaggccagacctgcgctgcccaccccaggagggagcgcctatcttcctcggcgtgggccgctggtgctcccgc

SEQ ID NO: 686 - DNA, 421 bp, Homo sapiens
cgagcgggcagccttggaaggcgccttgcaagtccgctcccggccacgcgcgcccctcgggccctggtttcgcacccctgccgccgcccccacgcgccctcacggaccccgcgcgccccctctccccggaccgcgagcgcacccaccgaccccgactgccccggctcgctccgaagcctccgcgctgcagttctcagctccaggagcagggctcttgggtttacgtctccaaggcaaccattcttcaggctggctgtgacgccacaaaggccgcggaggctgggcgcttgagggctgggcctgcgggccgcgggacagggagggcgcggggccgggctgctgggtccgagctctgggcacgatgtcctccctgacgccgccaggacagcgcctggcccaggcctgggcctggtgaacgcgg

SEQ ID NO: 687 - DNA, 2606 bp, Homo sapiens
cgcatccccacgcgcaacagagccaaaagtgctggggcgggagcgggggccgggaggtaggggaaagcggtcgggggaacgctggacctgggctccaagtgtaggtctgggccccaaatgccccatttcccccttcctgggggcgggcaagggacagggaggttgtcgggaccacggatgggtagccacggtggagcgccggcgacgcgcggaggagctcagcccgagtggggctcgtctgcactggcgccgtcggcctggcgggacgagtccccggcggtggcggaggtggcgtcagggcccccgccctcgatggagctctcgctgcccgtgctgtcgcctgacagcaggcgcgtcacccgcaagtcggcctgcagggtgcgcacgtcgttgccgaagctgagctcgcccaggtcgctaataagttgcgacagctcagccttcatgtcggaggcgctgcccagcagcagaggcggcggcccggcccccgggcccagggagcccccgccgcctcctagcgcctccccacggccattctccagagtatccaacaagtccccgcactcaaagtgcatggcgaccactagcgcacgctgcgcctcggcctcctcctctgctggatctccctctgccgcacggttctcctcctcctccgggcagccctcgggttgctcctcttcctcttcctcctgcagctcctgctccagctgttcgccgagcaggtcctcggtgatggagccaagcttgggcgcgctgcggctgcgctccaccggcggtttatagcagcagggtccgtgtaggagcagcttgcgcagcggcactagcgggatggtgtgtgcgcccaccagctcctgctgctggtgacgcgcgtcgtcccgccgcttgaggcgtttaaattccgccagcgcgttggccgacgtctggtagagcagcagggccatggcctgcgccttttcgggcttggacaccagcacggcgtggcagcgcagcatcacggccttgtgcttcagctcgtgccggtacacccaggcgaagaccttgggcagccgcgcgtcggccacgcagtaggtgacgcggtgcagcaggtagaggtggcccgggcggcgcagcgcgcgctcctcggcgtgcaccatgcggataccctgcgcactcaccgtcagcttcatcttggtgccctgacggcccgcctcgctcttgctccagatcttgcccacagcaaggtcggtgcagccgtcgccgcgcgcctggatggtggtggcattgcccaggtagagcacggtgtaagttgggtcctcgctagtgatgtgcagcttcttgcgcttggagcggaacatgctgcccacccggctaagcgcgccttcggggcacgcccgcgccagcgagctgagcgccgagtagtgcaggctcacagcgtagcccttgggcttggacgcctgccgcggcggcgcctcggccagcagctcgaacttgtgcttcttccacggcagcatctccggagggcgccccggcgcagctgggcggcggcggcggcggagcgccgggtgcgaggcccgctgagccaccggcccctgccaggctcggcccgggcaagatcgaagaataaaactactgggagcggccctgtggtagggagttggggggaggggagcagagagagtgcttaggaaccccgcaggaggtgcgggtaaattctctaaaaaagaaaatattcagcttcgagtgtgcaaaaaaggttggtgcgggggagacacgcgcgcacacagaattaccccagcctgggcaagggcgagagcaaagagtctcaggcaagcaacaaaatgcaagggagaaagaacgagcgtagagtggaaaatgtcaggaaaaaagctagaagcgcgcgtgcaaataaagagagccccagcaacagcacccgggatggtgcaagaatatgcaggaactcctcggcgaacgtgaggtgggtcccctaacacacacaaccctcaggactggggccaaaacccgcggaaactctacagcgagtgtgcctaggggccggtgctccccacctccgaggggtgctggagatggaaagccccccgtttgggctggtctcaagtcagcagctcgcccaaagtgcggtcggatgctgggtccggctggccgcggcgggccccgcgcagcagtcccgcggggactcactgcatcttcgctccgccggacgccggggactcgcgctcggcccgctcagtgtccgggctggcctggccgagacggcgctgggctccgagaacaggggacgggcatggccgggtccgggaaccgccgctacctcatttcttccctccgaggcggtgtccagctccgctcccgggctctccacggtctgctgcccgcctttgcagtgcgccctctccggtgctgcgagcggcgtccggctcgcctgcctcacatccttgccgtccgggaggaagatctcgggtaaatataggccggcgcgaaccattcgccgcgcggggacaggggaggagcagagaagaggatctgttttgggctccgactccgggcggattcctggtttcttaaagggaccgcgtgacagccattggtcgagggagcggggagaccgg

SEQ ID NO: 688 - DNA, 1094 bp, Homo sapiens
cgggtcacccgcgcactgaagacagcctctgtgctctcggaacggctctgccgagcgtggaccagcaggagcgaggcgggctcagatgtgagacgtgtggggcgggccttctaaccaagacggcccgcttggtggaccccagcactcgagcttgttgggttttaatcatttttcctcggccctggattgcgtcagagttccgcgctgcgagttcaagtctttagaagttcctagggcctcgaaagcgcccagaagggaatttaaaccatggcagcgtccagaggcaccggccccagccccactggatgtgtgtgggtcgaggtcttcgggtaagggcgagattctcgccgtgtgggggtcctcgaacgcgcctctccgactcgggcaccagcgaagtgtctaagaagtgccactggctacctacgctcagcagccccacgctgggtgcagcgccccagccctttccaaccctcccgtgccgccctccggctaggttggctggccgtgggcgcctcaccttcaggaagtcgccgccctgacagtcgatggagacctggtcgtagtggatggtaatgaactcctcgggctcgctgatgaagaaggctgcgcagtgcagctgcggccggtcggcggtgaaggtgaactggccctggaggctcagcatgtccaggcaccctgggggaggagggcatggggcaataagtcccgggctgcagccgccgcagcgccgtcctcgggcggccgctctccgcgcgccccattcccgggctctgtagtgcccagcgccccgacttccagcctaggctgcgctgggttcctgcgccccgggcgcgccaccctctcccgctcctggcgcgcctccgcggaccgatccttagctaaggggaccgcgcccctggcggttccggccagccccttccccgagatgtccgcgagccctctgccccccgcacagagtcccaccttccccgcgtcccgggcgcccgcgagccgggcagcctcgactcacgcagagcgcggcggtacggctgctccccagccagctcccgcttcaggttggcgctgaagagcaggaaaggatcgtagtccgccgc

SEQ ID NO: 689 - DNA, 2168 bp, Homo sapiens
cgcgccacaaacggggacttaacccactgcccgatctctgtcagaggcgacccatttgcgcttctgctatcgcacctccgcccgcgttcctgcgccccaggttccccgctgcctccccgccccctgcagcgcgggagcgttgcttcgcctggcctgctggcctcctctagaccttggccaccttctccgtggcaggaagggctacatgcactgacagattttccgttggtggtggctgggtggtggcgaggcgtgtttccgggcgcgcttaaaacctagcagctctctccaagtagcagcttcccctactccgcccctaggactgaggacctagccctcgatgccccctcacttctccccgtcctaccccgccatcacctcctaacctctccagtatactctcaagcctcacacgggcgcctgtcctccctttgcattccctagctcccgggcgccccgttcggttgaagtttacgtatcttgggacctaattgctcccaattatccgcgcagcctaagtcccgcgtctgcctggctctcgccccgggagcctgaagctaccgggcagttcattgggtgtcctcggggaaaaggttcaagctgtagagatgagagaagtggggctgggggaggggagaggctccagaaggaagaccacgaacacgtgcgaagaaataaaagccaccacgtgtgcacgcgcgcgggggcccaagggcgcgagcgcggagcacgccccagggggccagggacagtggtcccctgcagcgggcatagcagggggcgcgggtactcacacgaaagcgtggtagatgaacgcccagccgcggggtctctccagcacgttgtacaggtagttctgcacccgccggtacttgacgttgcgccggcagctctggctactcgtgtaagagagcggcttccccagcaggctcatccgggccccctgcttgccccggcggctctccctcaggccaccgccgccgccaccgagcgtggccgcgcgggtgcccagcagtagcaggccgtcgcccctggcggctgccgagttcagcagcaccctgccccggccggactccacatccttcatgccgctgcccaagcgccccccgcccgccgccgccgccgctgcgccgctcttcacccagagcccggcggcgccgccctcctctcctcccgcgtggtggcggggcatggcatcaccacgggcaccgcgagggggccgccagcgcctgcggcgggggcagcggcctcatgtgcgccggcgggtttcaaggaggaagccggcggccgacggggcgcccgccagccagagacctctgagccgggggcggggaagcaggcagccagcaaaccgcccgggcttcggggcgggaaaggaggggctgcagaggaggccgaggagtcccaatttctaacagcctttagcttcgaattctaaatccggacctgtttggggcgtcactttgagagggtttctcttgctccctcattcccgcgactaccactccctccttcccaaactgcccccggggatagagtgggggagtgcggggcgctccgaggcgcgctcccacgcgcgcacacccagccccaggcttccccttccctctctccactccccacgccctgcagcgaaacggccccagaagcccctctccgaggcgcgagttcggtttggttctggcaggggctttgcagctgtccggaaggtgaagtcagccttgtgtcctgaggagaaactggagatgcaggtcgctgtgccctcccgctgctacgtcgctgcgccggatcctgccatccttccgcaaggggtgagagcgggaacagccctgccctgccttccaggtattatctagcctggaggctggagcgcaaggtaacgctccgggaagtggcactcgggtccccgcacacgggcgagtcctcagcagttcagtggacagacccgcaggacgcggctgccaagtccgcgaggcaaggaccaggcatcttcccgcgcctcactccagcctgcggactgtgactttccatcccagtatcagacaagctcgcgagtaactgaacatcctttccagtccatgggtggggtgtggaaagggcgtaaaactccaaagtggctcctccgcggtgagcgagctgccccggggctctgcctgactgcagcgcga

SEQ ID NO: 690 - DNA, 1204 bp, Homo sapiens
cggggcttgacgccctgatcccgggtcgctggccgggggcggagacggggatagcgagctgagtgtgcgagcgccaggggttccagctgcacgtcccaggctctccagcgcgcggcaggccggggcgggacgaggagagctgcggggacaacgcctgtggctgggtccggaggtgcgggtgcggcgcgggacaagcgggcagcatgctcagggcggtcgggagcctactgcgccttggccgcgggctaacagtccgctgcggccccggggcgcctctcgaggccacgcgacggcccgcaccggctcttccgccccggggtctcccctgctactccagcggcggggcccccagcaattctgggccccaaggtcacggtgagccagggctccgacggggaggtcctgggagggaggaggttgcgggagggcagcgaggggccggcccgggagtcggcttgagggcgcgctgatcctctgtgccggtgcgtcagttcccgcgtccatctgggttgctttcgctgcaggggagattcaccgagtccccacgcagcgcaggccttcgcagttcgacaagaaaatcctgctgtggacagggcgtttcaaatcgatggaggagatcccgcctcggatcccgtaagtgtggcgaccgccgcgcgaaggagagtcggtccccggccgcaagggtgcggggtgacccaccttccgaccgcggccacctaggagcgaaagcggccgcagtgccaacacttcgcaatatcacccaccacacacggagtttacccacacacacaccccgcctccagtgcggtgtgtcaagagtcaattaagcttacagggagattgcagaaggtgggtgaaaactgagaggttcaggggacacttccagcaccgcccagattgccggtccccagcaagctccgaactgggaggcagtggggctcttgtgccaaacaggccacggtcctcgcgagcatccggatggctgccgggacgccagaccgcaatccaggctttggccgggggcgtccccctaccccacccaaggaaggggttctctgatcttggcttgcggggcggctgtggcgggggggtctctggaaaaaagacgcatccatgcggcctcctcttctggggcaggagacgcctggcggacgtgtttctgcagccctctaggctccgggtttactcagggtgggacgcgcgg

SEQ ID NO: 691 - DNA, 1770 bp, Artificial Sequence
  Description of Artificial Sequence: Synthetic polynucleotide
tygtttgggtttttaattyggggtyggtatttgtttyggygttttgtygttgttttaggtyggtggtgttggatttygyggygtttgggtagaaaygaggaattttygttaattttatagggaggatttatttttagtttttttatttttttaaaaaatatttaaattaaaataattattataatttagatygtgggtttttgyggayggggtagtagagggtygggggtaataaggtatttyggtagygttttttggygagaggagagygygtaggtttttygttygygtttygttttgtygtygtygtygtygtygtygtygtygtygtyggygttttygttyggtttttygggtttattttyggttttttatttygtgagatatagayggtagtttttygatygagyggggtataggttgaggyggygttagtataattgtygtygygygtttygaggagattygggtaygaggaaataaggagaaattaggatttttttttyggaatygatyggtagtttygygttttygygygatatttttygtagttatttygyggggygggttaggatttggggaygyggttygggaagagtyggggygggyggyggyggyggyggtaygggygygagggtgygygtattgggattggagaggagtgagtggygggttgggyggyggyggtygtagtygygggtgttttttygttttatygtttygtaggtagtatygtttttygggtygyggtygttyggtygggttttttgygygttttygggttyggaatyggtataygatgtattyggttgygttttgatygtygtygygttttagtttttgtygygatgattttttttgagtagtygtagtagtagttgtagtygtygtygttagtttygtygaattatgtggtgattattatygagaatttgtyggtygagggtagyggyggyggygggagtttgttygttttttttygggttggygtgygttagaggattygtaaagtgttgaataggtgagyggyggygtygggygagggygyggggggygggggttgygggygttyggtttygggtttttttygtttttggggyggtttaygggttttttgggayggggttgyggtyggaggagattgaggagatygggygaygaygygtttygygggygtagagaggtygyggtagttttgtttyggygtagggagttttggagtggtggagttgtagttggttygaggygggagttyggggagaggyggggtttttygtatttagttattttgtatgtgtgttygtatttatattttttataygygtgtygttttatttttttttttttttygtatttyggttttgygatygggggtyggggggaygyggggattyggttagggttgaggagggaggygyggggttgtagagatggygtggaagttttgggtttygtgttgtttttygtttygtttygttygggggtttygattttttgtygggggaatggggtygtagygatagtttagtaggyggagggaatttatttttttagtttgaygttttagtygtttttyggattttttttggttgggagtagygaagagagggttagaggtttggaatagatttagtaaagtgtaaaatattgygggtagggtgtgagtyggyggygtttagttatttygaagygtttatgtyggagggggygggtgtygatygtyggygtttttagtgttggaatttgygtagtggatttaggaygttgayg

SEQ ID NO: 692 - DNA, 1834 bp, Artificial Sequence
  Description of Artificial Sequence: Synthetic polynucleotide
tygtttyggaatggggaagyggttgygttttggayggagaggggyggggatttygygattgtaggyggagggagggygggtgtygttggygtaggyggtgatagggagatatygtygttattgagtatttttatgtaagtttttttatttttttgtgtattagtgtttatattggggtaatgataaatgttgtgttgaaaaattatttgatggggttatggaaggaayggaaggaayggygttttggttygttyggggttygygtaygtygttattaagtygygggggygggtyggaggggagagttgygttagttaggtygttgttagatgaygagttyggggygtgayggggtggagtatttttaaaaaagtgtatgtttaggatttygtttagtgtatttttgygygyggygggtygggttgggtagttttataaatagtygtggtgtgagtttygaagggaattattagygttttttgtttayggagttttaggtttataatggtagyggtygttagtttygygttttttttgtgtttttygtttttgtatttgttgtttggttggtttygggtaggatgggtyggtgagttyggggatgtagtttaagtagggygggggttaaatttgggaggttgtggattgtagygggttttagaggaggggaggtttttggaaggatyggygygatttttttgaaygaatatygyggttttttygaaygtygyggttttttygaaygtygyggttttttygaatatygyggtgttttygaatatygttgttttttygaatatygygattttttygaatatygtgatttttttagatatgtttagttgaaggtatttagtttttttyggtggttttttttygtygggttygttttttgyggttgttgtttgttttttaggttaggaggtttttggaaggatyggtgttgttttttygaatatygtggttttttygaatatygyggttttttygaatatygtttttttttygagtaaygygattttttygaatatygyggttttttygaaaatygygattttttygaatattgttattttatygaatatygygatttygtygaatatgttyggttgaaggtatttagttttttttygyggttttttttygtygggtttgatttttgyggttgttgtttgtttygtaggttaggaggtttttggtagtatyggygygatgttttygaatatygygttttattttaatatygygattttttygaatatygtgatttttttygaatatygtygttttttygagtaaygyggttttttygaatatygyggttttttygaatatygyggtattttygaatatygtygttttttygtatattgygatttttygaaatattgygattttttygaatatygygatttygtygaatatgttyggttgaaggtatttagttttttttygyggtttttttttttygggttygttttttgyggttgttgtttgttttataggttaggaggtttttgggtggattagygygattttttygaatatygyggtttattygaatatygyggttttttygaatatygyggttttttygaatatygygattttttagaatatygyggttttttygaatatygyggttttttygaatatygygattttttagaatatygyggtttattygaatatygyggttttttygaatatygyggttttttygaatatygygattttttagaatatygyggttttttygaatatygttgttttttygaaygtgtttggttgaaggtatttagttttttttyggggttttttttygtygagttyg

SEQ ID NO: 693 - DNA, 950 bp, Artificial Sequence
  Description of Artificial Sequence: Synthetic polynucleotide
gyggagggygttygttttgggattgtatttgttttygtygggtygttyggttttatyggattygtaggttttyggggtagggtyggggttagagttygygtgtyggygggatatgygttgygtygtttttaatttygggttgtgttttttttttaggtggttygtyggtttttgagttttttgttttgyggggatayggtttgtattttgttygyggttayggattatgattatgattttttatattaaagtatttgggatggttttattgtattagatttaagggaaygagttggagtttttgaatygttygtagtttaagatttttttggagyggtttttgggygaggtgtatttggatagtagtaagttygtygtgtataattatttygagggygtygtttaygagtttaaygtygyggtygtygttaaygygtaggtttayggttagatyggttttttttayggtttygggtttgaggttgyggygttyggttttaayggtttggggggtttttttttatttaatagygtgttttygagttygttgatgttattgtattygtygtygtagttgtygttttttttgtagttttayggttagtaggtgttttattatttggagaaygagtttagyggttatayggtgygygaggtyggttygtyggtattttataggtattygygttygygtygttygtyggggtggtygtygygttyggtaggagggagggagggagggagggagaagggagagtttagggagttgygggagtygygggaygygygattygagggtgygygtagggagttyggggygygyggtttagttygggggttttgygtgtagttygygttgygtttagagttaagttttttygtygggtagttgaaaaaaaygtattttttatttatttatygttygtgygagaggtagattygaaagttyg

SEQ ID NO: 694 - DNA, 1218 bp, Artificial Sequence
  Description of Artificial Sequence: Synthetic polynucleotide
tygygtttgtagttygtgtattttttttyggagttgygttagggaattayggaygaattggaaggggtygagaagggttttggttattatttttagttttaagttttttygtttttttagatttgggatttttttyggggaggattttttggygttttttggtagtttttygtygtttagggtygatttttttatttttagttttygggygggggaggtttygtayggtygtttagaygggttggggygggaagattgtagyggttttgggtttattttttgtttttttataatttttagtggagttgggttaattttaggtatagtttattygagttaggygaggtttagaaaggtttgattygtttggtagttttaayggatttgttttygtagtygttgattagtygttgaygagyggatttttyggtygttatggygattgtgaaatgtagggtggagygtatgygttygaagttattygygygggtagtttttgygtgtttttttgygtgtttttttaygtgttttttagygygygtagtatttygtttttgygttttttygagygtgtagttttyggtgagggtagttttaygtatagtttttaatattttttttagygtttgtagttttyggtgygygtagtttttaagtttatatgygtagtttttattttgygygtagttttaygtatagtttttaataygtttttagttttattggygtagaatttattatygtttgttttttaygygttttattgggagtgtagtttttatttygagygygtagttttaygtagtttttttatattttttttagygtttgtagtattttttagtgygtatagttttgttagtagtttttyggygygtygtttttgtatygtttygggttataattttgttggygattaagtttgaagaattttttgtggttttatttttttttttaggtttagttttagttttgatattttaattaaaaggttataygttaattaaygaggtattaaaggggaagattttagttgaaagaaatgattgtaggaagtgtgttagggaagttaayggaatygttggttygtyggtggtgygttyggtattaggaaagtttttaygatygttgaggtatygggtagttagtgttygttgttaaygyggagggaaygggyggagattgygggtaataygtggtagagtyggygtgagttyg

SEQ ID NO: 695 - DNA, 795 bp, Artificial Sequence
  Description of Artificial Sequence: Synthetic polynucleotide
yggggggttgggyggttgaggtygggaggtgggagaggygggttttgtagtttygagagtttttygyggttgtagyggtagttgttattttttggtttygttttatagtatatttgagttttttgggtagtttygagtttatagtttttagtagaggygttaattgttttttttaagtataggtygtygygtttttaattttttgtttttatttyggttygttygttttttttttygttttttttygattgtagygggggtagygttttggygtttttaaggatttttygttattttttttataaagtagyggyggtggyggyggttgttgttggatttttatattgtagttagtagtttaggaygttttyggtyggaygatgggtattygygtttgagtatttttygggtaggygttaggygygaaggtagggggygggaggaaaggggygggggaatttttgattttttggtggattttggaagttgtttttaaataaatatatygttggttygyggttgagtagttatttygttagagtagtatgtggattggttygtygggtttttttygtgttttgtgttgtygtygtygtygtttttgttagagtagtagttgtyggtagtaggagtttygtayggggygyggagtagggaygygttgttatygtttttttttgygttttgttggtygygttttttygggaggtggtagtygttgttgtygttgagaaattygttygttttttayggttggtygtttggtgaggagttgagattttgygttttygttyg

SEQ ID NO: 696 - DNA, 686 bp, Artificial Sequence
  Description of Artificial Sequence: Synthetic polynucleotide
tyggttgatagtgttyggtaagygggggttttygttgaagtttyggaattggggagggggygtttygggaygtygggggygtygtagggttagtttttgtgtygygtttyggggttgtgagttaaaaatatttagtatttyggygtygggattyggtttttagtgttgggtaagttggggtygtygggggatyggggaygagattgygttygggtttttgtgyggggttygggggtygtgattaagagatttagtatttygggttaggtaygyggtttttggtgttyggtgagygygggttgttggggygygggygygggyggtttgggtttggtttttgyggggagttttygggttgtgttttggggttaaygttttgattttyggggtyggtagtaggttgatygtgttgggtgagttttygygggattattygggyggygggatttaggtggaaggyggyggttgtttygyggtattyggttyggttttgtgttgggagatttgggttgggtttttagggtgggtaggagttyggggagttttagaggtttgtatgygggggtgtattttygtgtttttaygagtagtatttygggtygggtattaggtttayggttataggtgagattygggygtttttttattttttagtttttyggttttyggagtyggagggtggatyg

SEQ ID NO: 697 - DNA, 1565 bp, Artificial Sequence
  Description of Artificial Sequence: Synthetic polynucleotide
tygtttttgtagyggaygtttttygatttatttattygatttyggtygtattttgttttgtattygtattttatttttagattttattttgttttgtygtgygtttaatagttagatgttgggtttagataagygttttttygttagtgtgtygggatgagygggggttggatttttagaaaggggtttgygggygtaggagttggggttygyggtttggggtyggtgagttgyggygaagaggttagggagggagtgggagggtttattttgtaggagygygtagtattggtygttygyggtgttttagagtygggtygtgtygttttygttgttygttagtaggygttgttygtyggggtttaggtttagttagttgatgttttygyggtggtyggygtagatttttagggtygattygtygttttttatttygttggtagggyggggaataagaaggagttgygtttygttagggaggggygtttyggggttygygyggyggtttygtaygattgyggttygyggttatygyggggaayggggagttygatttttgyggaggtaygyggygaggggagggtgaaggattttagtttttygttgtttttagtttttgggttygygaatttagggygttgyggggggyggtttattygggattttygttttgggtagagttttgggygygygggtagagagaattttttttttagtatygttyggaggatttatattttatygggygaataaggtagttgygtttttggtgtataaggagtttttygttttttttygygtttayggggttggggyggggagaggaataygggaagtygagygtttygygtttttttyggtygagygyggaataatayggtttagtttggtttttttttagagattattttttattygatttttttttatttttygggttgygttttagtttttatttygygygtttgtagtttttttttttygtygttgtgygggttygggggayggttttaygtgygatttttttagttgttygggttgygtttttgggttttggtttttgttattttygtygtygtygtttgggttttttgagttaagggtygggaygagggagggggaggyggataaagggtyggggtyggggagaatygygygtygggaatttatttggggygtagttttatygatttttyggttattygtttttattaggtaagttaggtttttttatgttttgagttttaaggattttgttygaggggttttyggggatttgggggyggttttttaatggagggtgygatagggaaagtttygagttygttttttttgggaaattaygygtatatttaggattttattttggtttggtyggagtggggatgaggtgygagtygttgyggggtyggtggagtygggatgttaagtttattttttagtygtygygggttttttyggtttggggygtttttaatggatttyggggtyggtttgagttttttyggagygttyggyggttggtttttattagggtagtttyggygtygatttygttggggayg

SEQ ID NO: 698 - DNA, 1911 bp, Artificial Sequence
  Description of Artificial Sequence: Synthetic polynucleotide
tygattttygtttagagatatttgggaaagaygtttttttygttagagtgggttatttagggagaagtygggtagagttgttttttttyggttygtttttyggagtttgtagtygygtttatttaaattagtttttttggaaagttagygggtgyggygygttygagtagggtagtttattattygtagtyggtagttaaggtygggaaagttggttttagagtagygygggtttgtygggtgttgtttaaggtgttgaaaggtttttgygggtagttggygggaggattttgygygtttttagtttttyggttattygttttgtttttttagtttgtygttttgtttttttttyggtygygtagaagttttygttttttttttaygtttatygagtttttttygttygggtgtygttaatttygtygtatygggygtygygttttatygygtttygggtygttygatttttgtttttagtagttatttgtaggtgtygyggtygttgggtttttatygtygtttttttttatttttttttttyggttaygggagyggttttttygttttttgttggatttttttttttttttttgtttttggagggtttgygtttygatgtttttgattttttttagttgtttggtygtttgagttatggygggttayggygttttygttttygttttttggatttttagygtttagygattttygaggygatattttttaagaaggggaagggggtttttgttttatagaggggatagygttygtggygtttygagggtyggttgttgyggggtygygggaaggygaaggtagtttyggaygyggagggygaggggyggttgttygyggttygggatggygttgtygtygyggtyggagttygtttgtyggygttygggaygggttttgggtagggttygtygttttttttttttygttttttttttttttttgyggyggyggyggyggygaagygggggggygggggyggggaggyggttygtattgyggyggyggygggyggtgagyggtygyggaaggggyggattygggygtttagygygggaaggttygggggttyggtyggygyggygaggttgggygtattgggygttygtayggggttatggygagygtygagttttygtttttgtagagtttygygtygtygggyggygggaataaagyggtygttttatttyggatttygttgygggtygtagggttaagtygggggaagaggggaggttgyggygggyggygygtttygygttygggygattyggyggattagygygtttggyggyggygagygyggygatatygygggagyggaggttyggtttagagggygggyggtagagggtaaggatygggtttggggagttttygggyggtggtygttgagggttyggaygygttattttygagttyggggtgyggttttttttygggygttttyggygtggggygygygttttyggggttttttggggaagagtyggtttttygygtygtaygttgggagtttgatttgttttttttagattatgtgggttttttatttgtatattttygaattatagatgaaaaygtatttaggattaagtgaattgtttttttttgagtttttttgggatagaaaaggaagtaggttttygttttagtttygttygttttttattttyggygttttygygtaygtttttttggggaygtygtttgygttygtgtttygyggggaagagttgtatttgggttygtagygttagtttagtttgyggtaggyggagggggtttagggtttagttaattatttygttaygtygtataggagttagtyggggttttyggttygggagttgtygtttatttattttttttttatttygtgggayg

SEQ ID NO: 699 - DNA, 2213 bp, Artificial Sequence
  Description of Artificial Sequence: Synthetic polynucleotide
tyggttttaaaygtttttttagttatttgtgaatygygaaggagtyggttttygyggyggggattttgttattagtattttygygggtygaggtygttttttyggtyggtttttygttttattygaaaaggaattagagtatttatttaagayggtgattggtagggtagattaaggtgttttggtttyggttttagtttygyggtgygtttygttygtttattttgatygggtgtaggtagttatygtygygtagggygtttaattyggygttygtyggygtttyggygtygttttgtaggttgygggtgagatgygygatgtaggtggtggttagtagtagtaygtttagtttggatagtttggtgtygggyggtayggayggtagygtgygttgtagttttaggaaagygtgtygtagggtttgtattyggttgygttttygygtygtattygtygtygtyggtygttygttttyggaaygygagtygtttttagggttygtyggtttyggttyggttygttygggaygygagtygyggatggyggyggttaggggygygggttyggygttggygttgagggggttgttygttgggyggtygyggtttatggtagtttttygygtygygygygttgtaaaggatygaaggtgyggtgaggtyggggggyggtygggtttaattygagaggygtagttttttggtttttttygtgygtttattagtagtttaayggggttaagggygtttttaagygagttygttttgtttgggaygygatttgttttyggaygtttggggagagttgyggaatttyggagtttttgggttttttagaaggataagaagaggygtagtgtyggttttgttttttaggggtaaattaagtaaaaggtttattttattygggaagaaagatttyggaagtatagtttaggattagtattygttygygtttgggtgattttatttaattyggtaygtaygagaggtggygyggttttttttygtygaygtygyggaaaattayggtttattagtygttttyggttttttaygttaggggggatttttgttygaggagygggggatttttagttttatttyggggtayggtattygttatygtttygagttygagagttgygtagtaygygtttgaygggttttttattttttttggagyggttgagtggagtttygtttygtygtgagggygggygaggggygtggagtagggtttgtgtggttagggtygygttggttattttattttygttyggtygatgtttaagtygayggttgtttttaattttygttggttgtgatttttatgygggygtttygyggttaggygtgtgtgtttygatyggttaaggtaggtygggyggaggatttggtttatyggagaggttaygtygggggttgaggyggtttagagggttattaattaaatttttyggyggggygggttygggggyggggygtttttttggtttygtttttyggtttattgttttaygttgtttttttygaggygtttygttgagggyggygtgtggagagtttggggtgtttgtygtyggttgyggtggggtygggttggaggtygygggtgaggtttgtggttaatttygygttgtygaggttttattttttygagtttagtttgattttaggtygtttttaggtyggtgtttagttgaggygggaaygttgtagtttggttgagygtgatttttaggttttgtgaggaaaagtygagygygttatatygaggygttagtygtttattttattataaggtaaaagatttatgttgttttagttattttaaagttgggagatatattgtattttttattagatttygaatgtttttagtgtttgtaattttttaagaagtttttagagtagatagtttttggatygtgggtattttttttyggggayggggattttgttgatygttttygttgttttygygggggttatygttttttaattatttgggygaaatatttttttttggttttgtatttgtggatttaygggaagygtgatttgtagygaggtaggattygattttaggtttttttagaaagyggaygttgygttttaaggtttgtttagagtygttttaggaagtygtgggttttygatygttttaaatygtagyggtttttgtaggttttggattygtygttttyg

SEQ ID NO: 700 - DNA, 1247 bp, Artificial Sequence
  Description of Artificial Sequence: Synthetic polynucleotide
tygtggggtattaygygyggatttttgtttggyggtttttgygttyggggttgttgagttyggggttygttttgaggtygyggttgtggtttttggttttttyggttygygttattgtygygyggygttygttgtattttgttttttttgyggtttygtatgtttttggtggaatttagttyggyggaygaygaggaggatgagatggaagtttgttggaaatygggtaaattttatagaaaattgatgaggaagayggtygagagtaggattttgggagtatttatggygggtaagtggttgygtttttttaggaggyggtggyggyggygtaggaygygyggggtayggagyggttggatagyggtyggggttyggtttttygggyggattyggagtgygaggagtygggttttagttatataaatttyggtttygttaygttttttttygtttttygtygggaggggaggaatggggagggagggtagaggaggggtggggagggtgggaggagagtygggtggtgygggtyggaggtgtgggggagaggggtygyggtgygtyggtgtggtaggaagaygtagygttttygygggaygygygyggggttgtygggyggtgygygyggygygggtygtaagygttgatygggggaaggygggygttgtyggttygtggtyggggagtaaaggttggttygtygygttagggtttttttygaattttyggaggtgtggttttttygtagygyggtttyggttttyggttttygttagtygtttttatttttttgggagygagyggtttyggaggagggaagyggyggyggygtttttaagagatagtttggagtaggygtttttgttgtaggttgygtgttgtttyggggyggtggtatttttttttttyggttttaatygttaggtttgtygtttgygttttttaggggttagttyggagttagagaagtttygttttgggttaggygtagggtttagttyggaatagttttattttttyggttgggtatygttttttataaagataggygtttattttygattttygaggttaggtaaaggttaygagtttttagagtttggatygatgttaaaagttgttgygtttttttgtaggttttagttttttttttygtagtttttaattttttttgaygtagattttagttgttttattttttygtttgttttygggattttttttttttygyggtttgtttttyg

SEQ ID NO: 701 - DNA, 1861 bp, Artificial Sequence
  Description of Artificial Sequence: Synthetic polynucleotide
tyggtgagtagagtyggygtagttatagygyggagtygyggygtttattggttttyggagttgttaatyggygtgtaattttgtaggaatttttttygggtttatttgggagttatattgtygttttttttttttagtygtttaggggagttyggagaagtaggtttaggagggagggagttagaggaaaagaagaggaggagaaggaggaggattyggggagggaggygyggygygggaggaggaggggygtagtygyggagttagtggtttygtttggaygygttgttttttagatattttyggagttttagtygygyggatygygygttttygtygttttgtttttaaatttttgtygtagtttttttttaagttagygaatttattttttaaaattagaaattgaatttyggtaygggaaaggagttygyggaggagtaaaattatagtagagtaagaagagttttagagagtagttttttyggagtattaatttygtgtygggagtgtagaaattaataagtgagagggygtygygttttyggggygtagttgygggyggygggagtaggygtaggaggaggaagygagygttttygagtttygagttygagttttygagtttgagtygtaatygttgyggtattttgtttyggattygtgtgygygggttgygtygagygttgggtaggaggtttygttttgttttggttgtaagtagyggttgggagtagtyggtttttggggaatatgyggygygygtggattttgtttattttgggtttggtggtttgygtgtyggyggagtyggtgagtgggttaggyggaggatgygygygtygtttagggtgtttgaagttaygagaggagttygtagggaataggggagygttatttggggaatttttagtttttaagtatatatyggagattygttgggataaatgygttygttyggttattttttttttttttttttttttttagaaaagygttgttygttggygttatttygyggttygygggaatgggggtatygagaattgyggtttggtttagtygtagaggtttttgaagttatttttaattttttygttttyggygggttttgttgygtggtttgggaaggayggaggggaaagggtggtaggaggggggagtttgggtygggttygygagggaayggttttatttygygygtttttygagattagggatgatttggaaatttyggggttttttttttygtatattatttttttygygttagtttttttgtttgattgtatgtaagttttggggagatgggggttagatttaagagattygygagtgtttagagagaaaagtttgtaaaagtttttttgtttgatgttttttgyggttagggygaggtaatygatattaygtggaatygtagtaggygattttttaaggggatattgggggaggtayggaaygygttygaaaatgttgggaygtyggttattggatttttagttttgyggygatttttttttygttgaggggtggaggttgtatygyggggygttagggaygggaggatatttttataggagttataygggagtgtygtaagtagggygaggyggggtaygtgtgatayggygttyggtttygggtygtttggtygttgggggatagaggtttttttttygttaygttygttttttttggttttggyggggygtttttggggtygggaggagtttygttttyggyggagygtttgtyggtatttagtttttttttttygttttggyggtgggaatttgatttttttttttggtygygtttygggggttggagtttgtttttttaygtygtttaatgagyg

SEQ ID NO: 702 - DNA, 3378 bp, Artificial Sequence
  Description of Artificial Sequence: Synthetic polynucleotide
gygagygyggagtyggagagtygggagtataggyggtygygtygygttttggttyggttygggttygygygttagtatygttygtagygygggtattyggatttttygggygttyggggggttttagtaggygygggggaaygggagggggtttgygtgygtyggygggtgttttttagggggygtttyggygaggtttagagygggtygggggyggyggyggttggaggagttttttttattttyggtygggygttyggtttagtygtyggygaygygaggygttygyggggatttgtaattygtyggatygagttttygtyggyggggtygttgttgttggggaaggtaaggaaggtttyggyggggggttgggggygyggygggtgggggygtagygagggtgggagggggtygggggaggggygggygtttagattttttaatttygtygtttggggtttygtagtttygaggttttgygtttagagtttaggagtttggatttttattttttatttttttagttttttgttttttttagyggtggygatggaatgtggtaggttttygygagttygtattgggtaggttgaggagggggygattttggaygtaggagaggtttttyggygtygtygttttttttttatttatatattatagtttggtatttttttttattatatgtatagggtaggttggggagggygttttygttgtatttttagtatatatagaygttggygggggtttaagggagttttttatggtttttaatagttatatatagaygtagtaggtttyggagagttttygagygtgttttttttttgttaattaygtttagggttttttatagatattgtaagggttygagaygttttttttttaygtatagagttyggggtaggtaggagaaaattttagattttttttygaagttttygttygtagaagttttygtttgtagatttggtattggtagtggagattttttggaggtatttttttttatttygggyggagggttatttttgygttttttatttttaygygaaygtttggtttttttttttttgtttatttttttattgggtyggataggtygygyggataagtygtttttaattttgggtyggttttatgtygttttygttttaagygtygagtattttygggygtygagtattttygggttygygtygtyggtgagtagaggtygtyggttttttatygtygtygygttagtttggagtygygyggagttgtttygaggaaygagtayggttttygtttttttttggggaggttgggagttttggattyggttaggagttttttttttaggttttygyggttttttgggygaggtagagagttttttyggtttygggagggggyggyggagttgagaattatygygaagygatgygatygggagggtttgayggaggttgyggtttygagttygygtttttttttttggtygyggyggtttttgtttggttatttttyggtagtttgaagagaaygtttaatttggtattttagttttaggtygttgggtattttatttttttttatttttattttgggtttttaagttttttggagygtaggygtttaggttgggattygaagagttttaagttagtttttttttagtattygttttygtygygattttttygtttttttttygggtttggggygtagatttttgggttgtaatttyggagtagttgaaaggtaggaaggygtgtgggygggtagggggtttgtattttygttttagaggagtygtttgtygtttgtgttggggagggagttgggaggtttgttttttygttttattttgggaatttayggagattttyggtattttttttatagatataaatataygttttttyggagygagagtygtygygggggaatagtagaggtygygygggyggaggygggggaaaggggagttgggttttttttttatttgggagggaggtggtatayggtgtgtggggtttggggaggygattgttaygttttttagaatttttatgttttttattygtttgygatttyggttgtygaggaggtaaygagggaggtygagtygttttttttygtgggyggtagygaaattttgygttygtaygtyggggtgtygtygagttyggttttgagtatttagtaaggttaagtaggygaaggagggggygggggtttttgggygygttttygttygygtatagtyggggttttggaagggggtgtgygtagttygtygagttagtttygttygtttgtygttygygttyggttttyggaggyggaygttgygygygttyggggatttyggagygttyggygttttaygtttttttttyggttygttagttgttttttggygttgtttttagatttgttgygtttygatttggggggtagaaggttggttygggagattyggyggttgagggtygagtygygaagtttagggatgygttagagaggygygyggtttygygggtgggygttgygttggggggttygagtttggggtttgtygttttygattttagggaygggygtttgtttttgtyggggtttygygtaggggyggatagagggygattygtygtttyggttttaggtagtatttattyggatttygggttagggagggggygtagttaagttgtggagttttyggaggtttttttttttttygtaggtttyggtttttttyggatttyggtggtygygttygtgaaatggggaygygggttttgttttyggattttttttagttttygatttttygtatttgtttygagatttaaygtgttyggttygtagygtgttgggtttgyggygttagggtggttygagtttygagattatttgygtttgyggatatagtygyggggtttggtatgaagggttttagggagggtttagtaagygttyggggttygagtagttttttgyggygtttttygttttyggtyggttygatttygttttygggagtgggtygtggggygyggagttygtttttyggggaygtygyggggttttaggtttaggyggtyggygyggggtygtagtggyggaaggyggagggtyggygygttgtygttgattgtygggagagggygttygtatygygttygygyggttttgttygtttttttygtttttttygygtttggttygyggtttyggttttattttgggtagtttyggtygttatttttttttygttygttygttygttygttygttygttygttygtygttygttttygtygtygggtttygtgaygygtttygygtttyggtyggagtttttttygtyggttyggttyg

SEQ ID NO: 703 - DNA, 1646 bp, Artificial Sequence
  Description of Artificial Sequence: Synthetic polynucleotide
tygttattagtttaygygygtagtgggygtataygtggtgatttgtttgyggttgggtttttagtttyggttttttttttttttagttttygttyggttttttgtagtattaygtgtagttgygttgggtgtaggatggyggyggtygyggyggyggtagtagyggtgggtgttaggtttygggattgttgtagtygaggygttgtgtttttgttttttttttttttgttttttyggttttyggtygtygtygtttggttgttgggtttgyggttygaggatattgttggaggtygygtgtttttggaggggggtattttgygygtygtygaaggtattagtttttttttgygtgtttatttttagttaggatygtyggttatygtygtatyggtgtttttatygatttttaattygggggagaatggtatyggygattgggtttygyggttygtgtttatygaggagttttygggyggtggyggygtggtttttagygyggtttttattygtttttygggatygtagygttgtagggagtagagygattgggtatyggaygtggaagttttggggtttttgygtttygggggygtggtaggttyggttttggtttaggtgygagtgygggagttgygtaagggygaagyggagyggggyggygygggyggtggygggaagttttttttattttgygtttgggatgggygygygtggtattattayggygtygtyggyggttttttgttgygygttygttygyggttgtayggtttaggyggggatttgttgttttttgygtggttgygggygttyggggygtttttgttgttagttttgtyggttttgtttagyggtttgygtttgagtttgttgtygttggattyggtggagttaygggtgttgyggaatagyggttyggtygtygagtaggagtaggygygtygygtgtaggtygttygyggtagggggatttatttgttttgtattttatttttgggttaagtyggagttaaygyggttttggttggttggttgtatatttygttgtygtygggtttygggggtatyggggaagattatagygaagaggggatttatttttygtggttgtyggygttygtgtgtatyggygyggtatttttgggygtygaaatttgtttttatttagtgtgttygyggtaygggttggttatygtttygtatagygtgtgtttgattyggtttttgatggtagtygtttttttygtgtgttattygttgggtygtttgttggattgggygttgygttaggagataagtattttttataygygggagaagttgttggagaygttgygggtygtagatttttatagtgatttggtgaaggaggagtttaatattatatagggtgttttggagttgygtattaaagttgtggaggaggtgttgatttttttgggagattgttttatgttgygtttagaygyggtgttygatttygttattgttttygagattttgygtagyggttatattygtattttagtgtaygagggtgattagyggtataatattgtggatattttatttgttaaggatttggttttygtggatttygaygattgtatttygttttttattgttattygtttttataatyg

SEQ ID NO: 704 - DNA, 3723 bp, Artificial Sequence
  Description of Artificial Sequence: Synthetic polynucleotide
gygttygagggtygggaygtaygtaygggtygggtaggatggygttggygtygatgttygygygttttagggtttggtttggtygtttttttatttttgtyggtttttygggtygyggatttygygyggygtygggygatgttggtttgttygtggttattatttygttttattttygtttttttgggtygtygtattygtttaygtgttygtttttttttgygtaaaattttaagatgagtaaatattgggtttayggtggagygtygygggggtttttttgagtyggggygggtygggggygggattagggttyggtyggggygtgttygaggggagggatttttyggtttgygattyggygttgttygyggtgtttagygttygttygggygygttatggggaatygtagtatygyggaygyggaygggttgttggttgggygygggtyggtygygggggtatttgygggggtatttgyggggttggttgggtagggygyggyggygttggtggggggygtgttgtttatyggygyggtgttygyggggaattygttygtgtgygtgagygtggttatygagygygttttgtagaygtttattaatttttttatygtgagtttggyggtygtygatttttttttygtttttttggtgttgtygtttttygtttatttygaggtgagtygygttyggtygtaygagtatttttatttgtttttyggtttttygtttttgtttttayggaggattyggygygattyggtttttttttggtgyggagtttttagttggggyggyggtaggggygttgygttttgtttttyggygatatatttatygtygttatttygygattttttattygttgygttgtttgtttttygattttygtttttttttttttttttygtttgttttggygtttgttatttaggagatgttygtttttttatttagggatttyggaaataggygattttgttaagtttagtttttttygtagttggattttatttttagggtagttagttggatagataggtagatgtaggtttagttttttggttgtygtgggatatatatatatatatattgttatagttattgtttattatatatatttagtgtagatgttggtatatttttagaaggaggtttatagttygtaggggagatttgggttggataaaatttaggggaggggagggtgtgtggggattaggtttttgttgagaattttggggggaagtttgagggggaattgggggatggagtttatattttatattaggtttggttttygagtgggtyggttttggtgttagtttttttgyggttagagaaaagtagtttagggttgagttggagaygyggtgttttygattgtgggggagggggattygaggtttttttttgatggatatagtgaatttaggyggttggggtagagattagtagtaygggataygygtgatttgtgtttttttygagtygtagaygttatagtgaygaygtttaagtttttaatttttttaaatyggygggaaggattagaggggttgtttgtttttttgtttttggagagagttattttaygtggagttttaygttgggtattgggtayggtttttatatttttaattataatttatttttaagataattatgatgtggatattattattatttttgttttatagatgaagaaatagaaatgaattaaygtgttygagttttttatagagaatttagttaatagagtagttagtttygtttttaggtttagyggggattttgtttattttaggttggggaggggttttttttgagttygatgatattaggttygtttttagggaattttttaggtygtttttatgtttgtaataaaagggagattaaggttagaagtygtgatttaygtttgtaattttaggattttgggaggtaaaggtaggaggatagtttgagattagtttgggaaatatattaggtttggtttttataaaaaattttaaaatattagtygggggtggtggttgyggttgttgttttagttattygggggagttgaggyggtagaatygtttaaatttgggaggyggaggttgtagtgagttgagattttattattgtattttagtttgggtaataagagygaaatttygttttaaaaaataaaaagaaaaataaattagtygggggtggtggygygyggttgtaattttagttattttggagattgaggtgggaggatygtttgagtttaggaattttaggttatagtgagttatgatggagttatagtattttagtygyggtgatatagygagattttaatttaaaataaagggagatttgygtggggaaggggtgtttttttgttyggttttttggtttttggtttatagtygggttttttttttygtatttagttttggaattatttataagagtgggggygggttataagggttygyggtggttgggaaattttagggtttgtggtgtygtygygtaggtttagggtggygygtggttgttgagttttygtttgtgygaygtttttatggttatggaygttatgttgtgtatygtttttatttttaatttgtgygttattagygtggataggtgygtygtttttttygttygygtttyggygttttygygtttygttygtygtttttatygyggtttgtgygttgttyggygttttttyggygtttttygtaggttygtggtygtggtygtgtygttgygttataatyggtagggtgggagtygtyggtagttgttgtttatyggygttaygtggttgttgttygyggyggtggyggygttygtattgtgyggttttaaygaygtgygyggtygygatttygtygtgtgtygtttggaggatygygattaygtggtttattygttygtgtgttttttttttttattttgttygtttatgttgttgttttattgggttaygtttygyggtttgtagygttgggaggtggtaygtygygttaagttgtayggtygygygtttygtygatttagyggttttggttygtttttttttaygttattygygtttygttttttttaggatttttgyggtttygattgtgygtttttygygttyggtttttttyggggtttttgyggtttygattgtgygttygtygygtttagttttttttaggatttttgyggtttygattgtgygtttttygygttyggttttttttyggatttttgyggttttaattgtgtttttttygaygtygttagagtygtygygtttttattttagattttatygtagattygtaggaggyggygtgttaagattatyggtygggagygtaaggttatgagggttttgtyggtggtggtyggtgggtttttgttttgaggggyggggaggagaggagggggggggtaygaggtyggttgggyggggggygttaaygyggttttyggygtttttaggggtttttttgttgtgttggaygttttttttygtggtgtatattaygtaggygttgtgttttgtttgtttygtgttttygyggttggttagygtygttatttggttgggttaygttaatagygtttttaatttygttatttatattgtttttaaygtygagtttygtaaygtttttygtaaggttttgygtgtttgttgttgagtygggtattttyggaygtttttyg

SEQ ID NO: 705 - DNA, 554 bp, Artificial Sequence
  Description of Artificial Sequence: Synthetic polynucleotide
tygttaaaggygtagtatttyggatattttygggtttatygtygtttttttygttttttgttgtttttaaagttttattatatttttgggtygggyggtaggagtggggaygggagtggaggttttgyggagtagyggttyggggagttgtgggttgygggttgggyggggyggygygatgyggggygggyggtttagtttygttttttttatyggygtttttaggggatgaatgttttttttgayggtttttttatttattgatggattaattttgttygttaattttttagttttygttaaaaatgaaaaggagtygtttgtgtttgtataaatttaagagttaggatggatgtgygggggtggggygggyggygttttygtattggttatyggtttagttaygtttatggaggggagygggtagaggggagggggygyggtgtttagagtgggggttttatttttagtttgygygtgtgtgtttgyggtgttttatgygggaggtagggygtgtgtgtgtgtgtgygygtgtgtgtagttgttygygtgyg

SEQ ID NO: 706 - DNA, 1101 bp, Artificial Sequence
  Description of Artificial Sequence: Synthetic polynucleotide
gygttaagtyggttttttaatttggtttgttgaaygtaaatygttgagagtttgttgtatygttttttggggtttttggttgtygagtttygttaaggtaaagaygttagtaagygaggaagygtagyggaagaaaaataagygggygygygaggggagttttaggagggttgtygagtggttggtaggyggttttygtttttttygggtggtttygtyggyggttgayggttyggaggaygygygtttygaaaagttagatttygggyggyggygygttaygtygygttttttygygtttttttttygttgygtttygggaaaggaatttgttttttyggttttaggattggggagtgtgtygyggggtygagggtggggaatagttagagggagaygygaattaggtygttggyggagggtttagggggagygtagaggygayggtttttatgtyggyggttaatatgatggagaatyggtygttgttygttttgtaggtgttygagtygtagggtgygttygagggtagttyggtttggtttagttygtygatttttaygtttygtygtyggygttttaagatgygtygtatgaagaaygtataggagtagagtttggaggtygggttggttygggatttgttygtygttttggttttyggtaaggagtttttgtagttgtygtttatygagattaygttttttagygaygaggatatttygtggtttaattgttttatatttagygygttttygygtygaaaaygttttttttttygtaagtggttgagggtgagggagyggaaggagtgtagtgaaagtaggtaygttttygtttygttygttttttttttttttttttygttttttttagagtygtttagggtttyggggtattttgggggaaaygttttgggggagaataggagttygttattagaggygtttttggagggygttgygtttggttttagggatggtggtatttagtttttaygygtgttattygttttttaatttagggtgaggggttttatgttgtaygataygtttaygtggggttttaygttgtattttattttttttgattttygtagyg

SEQ ID NO: 707 - DNA, 548 bp, Artificial Sequence
  Description of Artificial Sequence: Synthetic polynucleotide
gygtaggygtttgttattatygttagtgtgttttgattaagygttttttgttgtttttaygttygggtagtagtagtagtagtygygaaagggtagggtttaggtggttgtgayggaggtygaagaggagttgttggtagagaagtagttttttgtttaggttgggattyggagttgggttttgggggtygtygttttgtaggttggtaaggagagattygtgagygtttgtgtgtttgttagggaaatagtaygggatataggygygygggtgygggtgygygtgtatatgygtatgtgtgtgtgygygygygygtgtgtgtatgtgtgagggtgtgayggaggygtttaygtgttyggttygttygtgttayggtygtttatyggttgtagaggagaagggtaggttgtgggyggyggyggggygyggaggggtagttaggagygtaggttgggtttygtatttttttgttttaaaatttattgatgtagyggttattgyggttgtygagyggygtttttttagagttyggggttgtgttygttyg

SEQ ID NO: 708 - DNA, 1153 bp, Artificial Sequence
  Description of Artificial Sequence: Synthetic polynucleotide
tygtttttttygtagagatygttagttgaggttgtaatatttgtttyggtaaagygttttygtagttttttyggtttgttygattyggtttttttygtttttgtttyggttgyggtattattttttggagttaygtttyggygagygggggtygyggagygagggggtygttgtgtygttatttattygagtygttygggttggtygygagtygggattygygagggttggygggttttggttttygaggaygtagatatgtggtttgaattttygtttttttagtygttgtttttgtgtatttttttgggygtttttagygaatgygagyggygaggygagggygagygygtygaggaagggygggagaggygyggagtttggtygygtygygttgygtygagygtygggtttttttygygagtttttygggttygygygygygttttttattgttttygtttttygygyggygygtgttttttatttttygtygygygttttygtattygttyggttttaygyggygygygtttgttttggyggtagyggyggyggyggyggygygttttttttygaaygtygtttttagggttgttggttgygttttttattgtttygyggttgttgttyggggtgggyggygaggygggggggaggtgtyggtttggtygtyggggagggtttatygttygggyggatttttattgygagagygatgygggtttaggygyggygygygggggttgtagggygtttagtattgggggttgtyggygygygggggtttttttttggtttttaggtattygttgttgttgggygtttttygtattttyggttattatggatatttygttttttygtygtttttttygygtatttygggaggtygtyggggyggtagtagyggygyggtttygygggtgtttaggtgatyggttyggtagyggtagagtagtggtagtagtygttattgtygttgttattgyggtygtygtygttggagagaggaggaygaggagggtaaggggtagaagtaggttttgttttgtttgttttagaggttatttygggtttttttttattaattaagygatttygtgtttatttygtaggagaygtttyggtagtttttaatttgtgtgygtyg

SEQ ID NO: 709 - DNA, 1146 bp, Artificial Sequence
  Description of Artificial Sequence: Synthetic polynucleotide
tygggagggtttggtygaggatttggggygtttygagattygygtgttagygtyggtggygtttagggtygagatttgttttttttttttttttttttttygtttttttttttttttttttyggagtayggtygaggtttttttttattygygagatttyggyggtygttagtyggtttttgygttygttygtyggtygggtagtttgtttaygygyggaaagttyggygyggyggtygaggggtttgggagggaaygggygyggaggygggatygyggtttttttttatttyggggggagtttaggaggyggyggtgttggagygygagtyggagtyggagtyggagaygaagagaggyggtgagaaygygggtgtttagggattttattttyggttttygttgggggttygygagyggttyggggaygtttgggttggggaagyggggttgttatttttagggygggaggtagagaygatttagtttttggtttygtttttttygygaygygattttygaggggttttgggtygygtttgtagygtygygtattttygtgtttttyggygtattttagygtattyggtattttttyggtagggygagggtttygggggaagggaaggtttygggagttaaggagggygttttttaggyggagagtttyggaaaatygygttttyggtttttgttttttttttaggtttgttttaagggaaagygggyggggygatttygtaygttttttttgttgttttttttyggttttttattgtttttagtygaatgtttttttgggaaggggggagggggtgttgygttttttttttaaagggttttttttttttttgttttttggtaggtygygagtaygagtggggtggggygtgtttaygggttttygtttttttygtttttttygttttttagtttagtttyggagtygtagtttaggygygtygttygagggtttaygtygtatttttttttygtgygttttgyggttatttaggttttttaggatatygtggagagggaataagggggtagggaygtttttttyggtaggagtygtyggagaagggggtttagatyggagggaggygagaagttttattgaagtygggygtagggtttgggayg

SEQ ID NO: 710 - DNA, 961 bp, Artificial Sequence
  Description of Artificial Sequence: Synthetic polynucleotide
tygtttttttygatatttaaaagtttyggttttgygtaatattgyggattttttttagtttttygttygttttttttttygyggggtttygtttagggtyggtttttygtttttaygtygtagttygggttagyggggttygtygyggtggygttygyggatgttgtygtattggtygttgyggtayggayggygtagtttygggygyggttyggtataggygtyggyggttttygttagttagtagttyggygaggygttggtttatttatggttttygggyggyggtttttgygtttagttttgygygtagttttygtttttygttyggggtygtygagttttygataygggygagatgttgaayggygtaggtttggataaagtttttaagatgtttttgtygyggaggtygaggattygttygttygtgggtgagttgggaggggygyggygagggagggtgggttyggggygggggyggygyggggygygtttgyggttatgygatattgtttygttygygtttygtttttttttttgggttttttgggttttttgggttgtaggattygtygaygyggygygttggtygtaygggggttgggygtygttgtatttgyggggttaaaaggttttaggtyggggygaggtgagyggygggygttagagattttyggttygtttttgtatagatgtgtgtgtgtgtgtgyggtttttttgtgygygtgttygtgygtttttaygygyggatgyggtttagggatgygatttaggyggtagttatygygatggtgggtayggtttggyggygtagagaagatgtagttttttttgtyggyggtyggtatygttgtgttgtagagtttaaaagtagagggggaaaaaggtattygaagggtttttygagtgatttttattatttggagtttygggttttygygygtttatagyggygayg

SEQ ID NO: 711 - DNA, 1040 bp, Artificial Sequence
  Description of Artificial Sequence: Synthetic polynucleotide
tygtttataygygggygtaggagttygttttatatatttttttttttyggttttyggggtattttagtattttgatatyggtagyggggtgtatttttgtagtygttatttaaggaagaygtaggaggtataaggyggggtggaggygtygygtagggayggaggtttattygtttagatgtggggagattygygggaggggatttygttyggttyggtgagtttygttgggagagtggtgtgyggygttggttggtaataggygtttayggtygagagagaggtagaggggttgtgttattygtygtygygtttygtttttttggygtatatttggtaggygttttagygtttyggtagyggttagttttttttttttyggggtyggttttgtygygtgatttttttttygtygaggtagtttttattygtattttygggygttygtgtagtttttatttggtaaataggayggtgtygtgttttagygggttgyggtttattgttygttagttttgtyggattagttygggtttygggygttttatgttgtttyggggaygyggagygyggggttgggatttttagggttygggtgtygttatygtaygtgtygygttatttttttygygaygyggtttttttygtttttygtaygtttttygtgttttygttyggygggggtygtagtygttttttttttggygygggagagaaaaggygygyggttagtygtaggtggagatattttagttgtgttttyggggatttygtttggtygttgygttttgygtttygtagtygttagagtygttttatttygygaygtttgggttgggygttttaaagtygttayggttttygttttttttaggttagtaaggygygygtttttttygttagtygttatggtggtttgggaaaggttyggtttgtagaaygtaattgatatygyggaggttttttgggttttagttttttttttygagtttygagggtattgtgttgaatttggtygttttaggtaggygttgtatgyg

SEQ ID NO: 712 - DNA, 1497 bp, Artificial Sequence
  Description of Artificial Sequence: Synthetic polynucleotide
gyggttttattygygggttttygggttgggattyggggtgttattygtagtgttgagygtttgtgttttgagatttygttgtttttaagggtttttttatttttygggtttyggttttyggtttygtttggtatgaggagyggggagygtatagtagggtgggggtatygggygtaygyggggaatttttttaygattayggttaygttaaatgtttgaatttttayggttgtyggtaatagygagygtagggagggggttgtgygygygggggttttggtggyggagtaggtattatttygagagygtygaggtttgtggtygtaatttygggagtatygttgygggaggagyggygtggtygggtagaggygattttttygtaggtagtatygggtttygyggtygttttygggtttgttttggtgtttygggtttttattyggygggttggygtgygggggttggttttygtygagattttgttgggagygggttttggttttayggtgagttyggttttagtttyggtgatgygtttygttgtygygyggggagggagagttyggtagggttaygaggygtyggtttyggggtygtttgaaattygaagagatttygttygttygygygttygtyggaygaattttygyggaggtttyggggygtagtyggygtgagggtggggttttatygtaggggygtygggagttttttygtttygttagtttaattaaggatygtttagaggggtttttattttgaatttyggtttttttaaaggaagggtagattttagatttttttttttttttttygaaygtgttttgggtgtttttttgtttttttttttggtaagttaggatagygtatagtgtayggagtttygaagtttttttagttattttyggatttttggttaaatttgagggtgagttygaaagatygttgtygtyggyggttattttagygygggttygttgagaatggaaatagtaagtgygygtyggttaggtygttattttttttttttttaatagttygggtagtygtaggggttagtttygggttagttagggtttagtataaaatgttttttagygatagtagygtyggaagttttttttgaggtygtggataagttttygygtaggggtttygygtttagtttatttygtatgttttygygttagggtttgttggtgggtggtygtttgtttygggttatttygggttgggtattggygtygatttygtttygtttgtggagttgtatttggggggaaagatggatyggtagygtgggaygtagagttaggttaggtygtaygggttgtgtataaagatatgttygataggyggggagaaggtatggtttatyggtttaggagaaagttttggaggggaggtagttygtttttggggataaygyggggggtygtattyggatattattagaagtttttgtyggagaygttaagggtgtttayggtgtyg

SEQ ID NO: 713 - DNA, 1845 bp, Artificial Sequence
  Description of Artificial Sequence: Synthetic polynucleotide
tygagyggyggggygtagggtgygagygggaggttggtgttttgttygygatgggtaggggagtygggtggtygyggggygaggagtygygagggtygggtyggygtgatattatttggyggagtttyggggaagagttttaaaggygygygttttttygtgtttygygtattygaaygggagtygyggagagttygtttttygttgtygtyggygtttyggggaggtaagtgttattygyggatttygagtygyggtygggtgggggyggttygyggttgtttygygttygggaagttttggttggggttgyggtyggagggyggygtttaagtttttttgaaggtttyggagggtagttggagyggygtagagtttgygyggggatggygggggtggtygygggtyggggtygtttgggggyggttatttygggyggtgygtggaaaagtaggtattggtgygyggygaggggygtaygttagagttttagtttygygttttgygtatttggygygttttggtygyggtttyggygagttttagtttgtttygggtygygatttyggtttygygtttttttgttygttygggttttttgtagttygttggtttygyggtygygtayggttaygtyggtaggtygygttyggyggtyggttaagttagtttyggttttgtygygttygygtttygggttatttygttyggttttttyggygttgtatttttygttttttttatttttagtygttygttatttttatatttttyggtgtttyggtttyggygtttgatttagtgtttagtaattaatttggygttttagaatggttagygggttggataatgggtgtatttatttttygggttaatttgaatagaggtgggaagaaaggtttttatagatagaaaatgttattygtygagygtttaaaggggttgttatttttagaataaatygtygtygygttygtyggtttttttggttatttttatatagtttyggttygygtygyggattygtyggtttyggtttyggttttygggaattatttattygagtgttttygaygggaaagtygggygagagttggatttaggygggggtygagggaaayggggaaattggagattygggtgaaggtygtaggggataaagagattgattagaaaattaaaygygtatttagaaggaggygtaggygattgtttaaggygyggayggyggagttggggttygggagygttygtttaaaattttygaggttygttaaagaggagggttygyggtttagatttttyggagygtgttygaggygatayggtaagtttttggggtttttaaattgtgaatggagtttaatgtataagtatagatagtagaaatagggtygatttgtatagattttttatttygagttttttgtgttattagtttygtygttttygyggtttggaaggtgatayggtgtttttttyggttttttgttygttatttttgttgggattttygggttygtttggggatatttgttgagygggtgayggaggttttattttttgattttttttggattyggtgaygygttaagtgttgggtaygtayggtttayggagtttgaatgttggggtttttttgttgyggtatttttagtttattggtgtagygggatygtgygttttygtygtagttttaatttagaggatygygtygygttagygtttttagttaggttgtggygtttttagtgggtagggttggttyggttttagttaggtgaagttttagattttggattttttygttttyggggtttagygtgtatttattttattyggtyg

SEQ ID NO: 714 - DNA, 408 bp, Artificial Sequence
  Description of Artificial Sequence: Synthetic polynucleotide
gygttyggttgttaggtaattyggttttyggttttttayggyggttttttyggtgtgttttattaagagygatagggttggtgattygaggggygygtgygyggtygttagtttgggatttgtayggatttttttttttttagtaygttygttygggggttttttttttgttaygtygttggggttygttygttatttatagttttygtagagtttttygggtatatygyggttggtygttyggggttaaggatggggygggagygtttatttattttygygtyggtyggggtatttaagaggygygttygtagttatayggygtttygtttttygtttygaaaaagtttttgtttttttggygyggtgtggygttttygttagtttagtyggatttttttygtttyg

SEQ ID NO: 715 - DNA, 3276 bp, Artificial Sequence
  Description of Artificial Sequence: Synthetic polynucleotide
yggttgtattgttgyggggtgtaagggygggggaaattatatygttaggygaggygyggggatygtgttggaaggttygyggygyggttttttttgggygattgygggggyggtttggtagggagttggggygagtggtygtygyggggtttygtaggygyggggaggtatyggtygggtattygygyggttgaggygagggygggggatgtttggtygggtagggaayggggtgggggagggtagaggggygagygagtyggagggggaatyggagtygagggygygygyggatttygaggttttttaggygggttttgagygattgtaaagtttgttygagttggttgagygtttyggyggtyggtgttygggataggtygtttatggtgtttttgttygagtygggttgtttgyggtygtygttygttygggtttygtyggtttyggggtttagygtgttttggttttygtagyggtttagtttggyggttagttygyggatggtttttttttggtttaggatggtttttttttgttgtagtatygtttygyggagttgtagtaygttgtttyggagtttttyggygtygtyggyggttayggaygyggygtatatgtyggygtttaygggtatygaggtgtagatgaagygygtyggttygaaattttgggtttyggygtttaggaggtagagggygagtagygtataggtgygygyggygyggtyggtyggtatggttgygggtatygggygtttygggttyggttyggttyggttggggttyggtttyggttgggattyggttygggttgtggtttygygagyggttygygttttgggygtygygtttttyggtygygyggtttatatygtygygttattaggtttttattgtygtttgygttgyggagttygygttttttatgtygtygygggaggggtttygagtygtygaygttagygggggaggaatttygttttaattgttygyggttygggttygyggygyggygggggttttaygagygygttatyggggttgttttygttygygtttttttygtttttttgggagttgtygyggtttttttttttttygttttygtttgggtyggygttgttgtttygaaggtttygagagtttagggggaaggaagtygggtttyggtttyggattygaggatggattatttgygtggtgttttygaattttygayggggttttaggygggygggaaattatygygttygggagatagaattyggttyggtttttttggttgtattgaatatttttgggtyggggtygtttggagtygggttgggtgtttaaggatttaggtygttaatattygagtgttyggtggttaayggttyggagtggggtttygyggygttattaagtttagagygggggttatygggtygtttygygttttttagatgttygtgtgttattgagaagtygtygggtagtttgggtatagggattttttaygggtyggggttttyggygtttttttttttttagttttygggttttgtggattyggtttygttttygggggattgttagtttttatttygtgygggyggggygttggggatttttyggaggtagatttagttgatygagttttttttgttygyggygtyggttygatygygggtaggyggygtygtyggggttggaygttygtagyggygtttyggaagggggtttygygggagtagtygttygygtttttagtagtttttttttgttaggygtygygygygttyggtattttygggtgtttatttgtgygtggggggttgtttttygtttgtttagtygygtttattttttaggtttaaaggttagtaggaagggtttyggaggtggttgggggygtttatttgagaagtttygttttygtttagatattttattyggtattygygtattygygtttttatttggatygyggggttyggttttygagatygyggttygggtttyggygtygggttgggggtttaggattagggttggygtagtygtttygtttygtttygtttyggggttattagagyggttaaagtttyggaaattttttygtttaygttttygtggtatagagaaggaaattgaggtttygagattgyggggtygggttatagtygtggtttttygattttttttygtygttttyggtttttttggtttttgygttttgtagtttttttttgygygtagtygggggttgggggtttttagttagtagggatttaygggtagtttygggtgtygggatygggygttygtttttygggygggagtagaggtyggttygatggagatttttttgagaaatggyggtttttattygttttttagttttygagygttygtygtttgygtttagtattttagtttttaagtttttttgagtyggggttgygttttygttgtttttttyggtygtygttttttggygttagagggatttygyggttygtaygggtttgttttyggtttygttyggagggtgtgygggttttygtttygttggtttygtttgtttattayggygygtttaaatttaygyggttygyggttttttgygtgttttgtygatttygggtygtaggaggggttagtttygtyggtttttaygyggggtttgygtyggtagygttaygggttggaaygygtttygggagaaattattygygyggggtygyggygttttttgttttaattttygtagggagtygttaggygggtgtttttttggttttagygttttggtttygtygttttttygtaygygtttagtggggaggtygygttygttaggtttggagtyggatygtgtttagtygagagygygygggygygggagaggagttttgttttgtttagggtaggttgtttagayggggygggaatttttagtttggtttygygtttttatttttagtagtygtggagtttttttagtygtttaaggttagggattttgtttggttttttttttagggtagtagattttagyggtttggtatttyggtatagaggagygtgtttttttttygtagaggaagggagtggayggygttagaaagggaggggagtttggggyggtgtttggggttagygggatttttgggtattgtggggttttaggagaggagattttygggtttagtttgtaattgttgtgtaggaggygttgggygggatatttgtaggygttgtatatataygygagggttattatgtygyg

SEQ ID NO: 716 - DNA, 1160 bp, Artificial Sequence
  Description of Artificial Sequence: Synthetic polynucleotide
gygygttyggtgttttaaggtttttaggyggagygygggygygaggtgygggtttyggggyggagygtaygttygggaggygggaagtgggtagtagygttttygtttggtttttgtgygtttygattygaygttttttygttygattaggtgtttygagagygtatagttgggagggttttttyggtygyggygagatttaygtttgyggtgtgttagggyggyggygayggtgaygggygtggggygyggygttgtttyggttgtygggtygttgyggygagygygygggtyggtttggagttatygggttgaatygtygygtttgtatygtgtygtaygtygyggaggygttygggtatagatygygygggygygtataaagyggttyggggyggtyggygyggygtagattttyggtgggtagygtattttagtttttttaggttagyggttgtagggagtttyggttygyggttttttygttttaagtttgggagttgtyggttttattttgtttttgtttatggggattygagagttttttagyggygtatttaggggtaagagtattgtygtgtgagtagygtttygggygtgggtgagygagtyggygggygggaggtyggagygtyggggtagttttttgtagttgggatattgggtagtttgaggttyggggaagggyggygygygyggtggagttgttygggaagttttagttattttttttttygttattygttttaattygtattgtttygagaygtttaggatagggtattggggatagttgttyggggaagtgggtgagtggyggygggaagggaggagygygggttttgtygyggygttygttttyggagggtttyggtygygtttttgttttygttttgggatttgttttttaygaatttttttttttttgtttatgttttttttgtttatttatttgttygtggygtttgygatygtagtggtatgaggaggttatyggaygttagttttyggagattgttygatattagtttttagtttyggtagtttaagtatttggtggtggaygaggygattaaggaggatttgaaatggtygygtttygtggaggattttattagygggtyggtggggtttaygtttatygaggagyggattttgyg

SEQ ID NO: 717 - DNA, 1134 bp, Artificial Sequence
  Description of Artificial Sequence: Synthetic polynucleotide
tygaaaaataygttttaggygtygggattttagatatttgggaaatagagtgtaygtagttgttgagaggtttygygtttggttttttttattattgaggygtagaggtgttgtggatagtttagatttatayggygttygaggtgaaatagaatttttagtttttttatgaggttattggtattttyggttgtttttagagtttttygatttagagttgaatgtaaagtaagygttygaaatgtagaagtagtyggggtygtttayggtatttgtttygttyggggygagagaagaygttaggttgaggttttagygattttaggtattagtttygaaggagggyggggagatygtaaaggggaagtgttyggagggttaayggttttygygtattttgygtttttttgaagygygtygttttttygygtyggggattgggatttgtttttggggaattygtttagaagayggyggyggattggggtygggtattttttagggttgttaggttttttttagttttgtatttgtygygtygttttatttygttaggaagttttagagatttyggggatggggtgggagygtttttttatygygggtttaaaaagaaggaaggaygtttttaggggtygtagaaggaggattagttttaagttataatttttttyggatttaaggtaggtyggttggggtttygygtttatayggtttttggygggggttygygygtttygggagtttygyggttyggggaggaaagaggagataagagataggygaggattayggggttgatttagtyggggtagggattatygtggaaaaattttggygaggtggggggaygyggaaagagagyggttygygttttgtattttgygtygggtatttygygttagtgtttygtttttagtgtttygygtttygygtttygygttttgtttttatttygggttagttgtatygygttygygtygtaggaatygtggagttggaaagtgggggygtygyggttggggggttgttttagttgygtttyggttagygatyggygggtygggtttaaatttagttaggttgggtaggyggtggtygygygattggggatygggygtttygtttttttyg

SEQ ID NO: 718 - DNA, 10783 bp, Artificial Sequence
  Description of Artificial Sequence: Synthetic polynucleotide
tygyggagatatttygagtttygtaggtgtttgagttgygttgygygttttagtygggaagtttttttttatttaatygygtygtttygyggaaagtttgggtattgtagaygtttttatyggtttatygatagttggttttgaagygggggtttagaaaagtaaaggggatagtgtttggagttaygatgtttttgatgtgaggyggttttatttaataattaaygaattaagttggaattgtaggttttatttttgttggggggaggattttaaggaatgttatttttttgttttttattttttgttttaygtttagttttttagaaggtattaggygtgagtagagtgygaggygtttatattttygtgttttttttattttyggatatttttgtattttagtygaggttttagtayggagtgagggttgtttggggtgttttgttgtgtgtggggygtttttgtttttygggttttgattttayggtttgggtyggygaggygtttttttttggygtttggattgtgygtttgtttygtttttaggygaygaayggtaggagtygggggttyggygggattyggatttagggygggyggaaggygagggtttttttttttyggaattttygtttyggaaatttgtaattaaatygggtttttttttygtatygttttygygttttygggtygtttttttaygygggtatttatttttygggttttygtagtatygtttttttygygtttattygygyggtygaygtygttaggggttttgagatygyggagatagygygttttggygtttggtggggtttttttagtggttagagygtttttggattagtyggttgtggtttgtgtttaaataygatggaaatyggggttgggaygggyggtggtaygtaygtggaggagaagaggtatggygggaaaattatagtygaatataggtygattygtattttttaggtattygtygtygtttgattygyggttttttttaaggtttygattygtygttattttttggtattatttatygggtttygattygggtygygagttygttgatgygtagttgttttyggyggttttygggttttgttyggattygygygtagagaygttygggaaygttgggttygggygttttttggyggyggtagtaygyggtataygttyggtttttyggttygagggggygygtggagygtaygygggattygygygygggtttgggttgttggtttatattttttygtttgttyggatggyggygttgaggtttattygtttttttattaataaygatgtttygggagggaaaaaatagagtttttaaaaattagagtgygagagaggagtgtgtgtgtgtgtgtgtgtgtgtgtgtgtgtgtgtgtttyggggygttggtgaaagtaataaaatttagatygtttttttggygagatagyggyggttataatgygtyggggggattaggggtttatttgtagattttggataaaagatgatatatygatayggtttagagtgttattgygtttggttttttagggagttataagtatatattttttgaaatatygtttagtatagtatttaattygttygttatttaatatygggaggggaattttagtagygtataagygygttttyggttttttggttttgggtggggagagtttaaatgagaaggatttggtatgtttagaygtttttttttttggtttttgtttttagtttaagtaattatttagygatgggttttaataaataygtttgagaattgtttttatgttyggtaaatattggattagttttttaatgattaggtttttgaaaaggttygagaaatatatattaggttttaattaagtttaatagttaataggtaaggaaataagttatttttttatttgaggtggggaatgttgggaagggggatttttatttttattaaattatttgattttattaaatatgatygttgtattaaataggaaagggggygtatttaagttttttattagtyggaatttttattagtttagttttgtttattaagggtygagtgattttgtggggaatatatttgggttttagtttttatttttatagagtttagtataaattatttttgtttagtatatatggtttatttggggattgtttatgggagttttgatttggtaattgtaggggagaaggtatgatttaaattattttygattgtttygygttaatttggatygtttagaggaggtaaaaaatgggtaaattttttggaagttttgttgtgtttttttggtattgaattttgtaagtaygygatataggagatattgaaaattaaagaggaagtattttttttttttaatatggggagagaygttgttggaagaagtttttgaagtggttttttatygtattaagaggttagtgggatggattttygygtataatttaaaggaaygygygygtttttagtttttyggggttggtaattaagtggttyggtygggygtaagtygttttggaatyggttgtagtttaagtttagttgggttygggattgagyggtatttttggttttttagaatttttttygyggtgagtggaagggyggtttygygygygggygtttyggggtyggtyggttgygaaattagggggtggatttttatttatttaggagtygttaagttygtaggggatygagtattatttaggttttgggtattttgagttgttttttgagttttaggayggttygatggtgtagagtttttaggtagaagttagttttttgatatatatatagtagtgagtaaagtgygtataagtgagttaaattttgaagaygtaggttygyggatttttattttagygttagagttaaggagatagaagagaggaaggagagaagtgaggaagggagagagattatgagaaaaagagattatgaaagtagagaaagagattatgagagygagattatgagaagagagaaaaagagagattttgagagagagagatagaatgagagagatttaatttttagtgttayggggtttaggyggggtaagygtttttygaagttattaaagataggggtggttttttttttttttttttagttttttttttaatagatatagtaygaatttttaatgygttttttttttatagataataatatagggtttgaaagtyggatataatttaggttttgtgygggttttttttygygttttttyggtttagttggttatatggaatttagtatggagttygtggatgataaagggatttagtgataggtttaataaaattttaaggagatttttgtttgatttygggatttattgtyggygataagygygttgaatggtgyggggtggggyggggggtggggggygggttttttttttttttttttttttttttgttttygygattttttttttgtttttttttaatatgtaygtttttaatattttyggtttttagtttttttattgtgyggttttgtatygttygttgtagattgggygaagatagattgttgaagyggatttygygtygggtgygtttttagggygttggggttagggttatatagggtttygtaggygtttttattgattttatggggattygaggatagagagaggygggygtygggtttatttttygggttttyggtyggttataggagygtatatttagattgtaggttygyggttttggttatagttttaaatttgtttttaatgagtaagtggtggaagtttgttagggtgaggattttttaygtttttttttttttttttggaaatttgagggttttttgtgattatttttattttggaagttttggggtttggaaaagttaaaatggttttaggttttttgatagtttygttttaagagatttgaaatttttatttttttttttaagaggattttgggattaggggaagttgtaagtggatgttgagtggttagtattagggtaggttgggygtttaattattgtataataaattatttgggagaaattygttggtttttaaaaatagtaagatataagtttttaaatattgttaagttagtgtggagaataaagggagattttttagtatttagaaaaattgtttttttttygaggatgagttyggagatgggaaaggatttttattggggtattagaaagattttygagtttttaattatttaggggyggtgtggaaygygggaataaagtgttatygygtttttgggttgttgygtagagtgttatygaygtatagatttggtygtayggataattatgtttgttttagatattgaattaaatttgattattaattatagggagygagaaagttagttgggatygttttttttgttyggtttttttattgttatttaattttttagttttgatggtgtagtttyggagagaatagagatataatttttaaatgygtygaygtttagttttttagygtttgtagtattygttgggttttgagttagagttttaagtatttttagaaattygygagatagaggagaaaggtttattttttagttggttaggttttttaagaygttttttygygtggttaagtgtgygttagtatttgttaaggagatttttttttagtaataagggtgggayggaattygtttttygtyggaaagatggatgygtttttttygggygtgttyggggttgtgtgtttattttttattyggggagtttattttatttttaaatttttattttttagtaatttatttagttttaygtttaagggttgatttggggggatygtatattttggttyggatygtygaaygttggagggaaggaggttygggatttagttttyggagagaggtttggaagttyggaaaggatgggagygtaagggaagggagaggtatggtttgttgggattgttaaagattttygttttttggttttttggggttaaagattttagggagggttgtagtattttttttttttttygagtttagaatttygygtattttttttaagttttttaagttaaagtttygygygttttgatygtttttatttttagttttagyggttttttaggttagtattagttygtagattttgaaaaggagtggggagtggggagaaggtagttagttttaattttagatttttatttatttatttttttagygtgaggtaagttaaatgtaataaagtgaaagttatygagtgtagtggttttaatagttttttaggttgaaggagttatttatagatttgggttagygaggggggtttgtttttttygtttttgyggttttygaagttattttttttttygtagtyggaygttgtygttyggggtttagatagygygygagattaggggagatgygggggagggtgggyggttttgggttttyggtygatygttygtaggtyggaggtygagygttttttttttygttttaattttaggygyggggtgtagtttgtggtyggaggggtttgtatygggagtttygttygttttagggtttyggtattttyggttttttygttygagaggaatygtttgtgggagtttygygggyggtygggttyggtttttaggtttaggttttyggttyggygtagtaggataaaygggagggtagggatttttttttttttttttttttaaatataggatttttattaaaatttttatttaaaaaatygaaagttttttgygttyggygttgttggggaatygygtygaatagttgagttttaagttyggggttgaaggttyggaggatagggtagagggttttttgtttatagggtttttttttttatatttgagaaatgtttgtataataaaataaaaagagaaaggaagaaagtaggggaaaaygtaaaaataaaaataaaataaaaaataaatttaaataagttataaagaaaggagttggatttagaygggaaataggtyggttttgaaggttattttggtaataattattatygatatttataaygaaaagygaaatttgttattagttgttagaaygtttatatggttataaatatttagtatttttttatttttttttaaaaaaaggaagaaattttttgtatttttaaagtgttttttatttgttttagaagayggttgataatatygttatttatataaatatattttataaaatgtaygaaagtaggggtggggggtyggtttttttttygtttttaagtgaygatattaaygttgggayggtttggttttttyggggagaggtaaagaagygaagttgygtaaatattttgtaaatayggygtagagtttagtttttttttaaggtttagaaggagaggtatgggtagagttgggtgggtggaatttgttattttaaggagaygtaggtaatttttyggygtttttttagtggagtygagagttaattygattttataataataattataataataataataattattataaggatygaggttttttygtygttatygtygtyggggtggggtttgggtttggggtygygagtttygttggggyggygtttattaagtttattgttgggtttggattagggggtgtgttgtygggtattggggggtgttggtygagttgtattgggygttgtattgtatgtgttgtagygattgygygttgtaggtagaaaagggaatgttygtttggaaggtggyggttgttaggttttgggttttgagygygtgatatggtttgtygtttttgattaagaygggtayggttattyggygyggygagggtaggggygttatttttatatttttttyggttygggygygttttattttgtagyggtggttttggaattagattttgatttgygtgggygtgaggyggatgaggttggttaggtgttygygttygggygtygataggtatygttgttgtygaaagygtygttttagttygtaggtttgygttttggagaaaagtattygtygttttygttttttgtyggygtttttttygtygttyggggtttttttgttattgttyggtgattygtyggtygagggtttyggggatttggagtttgagttttgagggggygtttyggtagttagatygtgtattggggggagggggagagagaagygygttaggygtttggaggtygygygtagtttgtattagattyggagtattttggatttttygtgygattttggattttygygtttggtagtttagtttygttgtttttgttatgatttttgtttttttttaygtttgaygaagaygtygggattttttagggtaaagagggaaattygtaggagtgggggttaggggttygttttttaaggggtttatatagtgtgggtgagaatttggggggggaagtggtattgaagattatygygggttaagggtttyggygtttttaagyggtttttttttyggygagaygtgggtagatttttaaaagaaatattttataattttagtattgatyggttyggttatttaaggtaggtttttgggggttttygtttttgttttygggttttttagatattttttgtattgtataaagygttttttatgatygygtagggggtagggtgagttatttatattygggttattygaagtttttttattttttattygtattyggaygaggttygttggttatttttagggygttaggttagttttttttagyggtyggagttygggggttgyggttggagttatyggttygggttgatattatatattagtttttgggaggtatagtttttttttttttttttttttaatttttygtattgaaaaaaattttggagattaagttttttttyggaattaaggaggtttgaagaggagggtagaggatattttatataggtgttaaaaatttttttayggattygagtgagggggttygggtttatatggttttttttttttttatttttagygtttaattygggttgyggttgtaggaatggaggggattayggtttyggtagttaagttttgttatttaygggagtattgaaggttttyggtgttggttagttagygygtgtaygggttgtygttgttgtygtagaaggggttttttaggggtaggttttgtatygygtttagggygttttgttttagyggttyggtttttttggttggttygggtttttygtttttttttttyggattttyggttatagagttttttttatygttggtgttyggtaggtttaagatgtttttgatygaaaatttygtttttgtgttggttagygatatggttygagattttaaaatttatgtygtaaagttgtagttttatttggttaattygtggygtttttttgtttyggygggygggggaggggggagttggggggagggattgggggaggggaggggggaattggttttaattattgggataattattatttttaaaaagagaaagaaattggggatggggaggaaaaaaatgaagtttaatttagtgtttttttttgttttttttgaaagtaygyggaaatggaygtaggaagtygggyggtttgygygtygagygtygygggtttyggttttagtttttaattttaggaggggtgttaaggyggygttagttygggtttyggyggtygttyggygygyggtggyggttggtggygaggaaaaaatgggttattgttygagygattagtttatataaggttgggttttatttaygaatttggggaggyggggagagggggagaaagagagggagggagggaaagaaagagggagggagggggagygagagagggagygggagaagggtggaaaaaagggggaagagatattaaaaaygtaaaggttggttaygtgtgggygggttttgggagttaagtggatgaagatagtatttgtagatgtgaaattgtgggttttggggagtttygygtttttagttaayggttttttagagtaagatgagaggtgtaaygtgttaattaattgtaaagayggggygagtttttttttttttaaatttagtatttatatataaagggttatygygtygttygygagtttatatatttgaaagggtygttttaataaattgtattttaaaaaaggtgggggtggggaggaggaggggagaaaataaaatagaaattaggaggagggaaaaaattttttttaatatttatyggtttttattttttygttttygygygtttattttyggtaagtyggaaaattggygatttgtggygtttttggaaaagggggagggggygaaggtygagttgyggaaattttttttttttatygttggtggttgtttaaataagattyggtttaaatggtaagagtttaatttttgtaagttttttaggttaatattttggttgaggtttaaggatgagtgttagaaatgataaggtaagtaattgattttagttaatygygagagagtttaaaatttaggagagagtttygtttygggtyggttagagttattattaagygattygtttttttttagtygttttttatttgttaaagatttatttattttttttatttygtttttttttattttttatttttaatttttygtttttatttttttgyggttaaggaggaygygtagtttattttttgttttgygggyggtttyggggagggyggggtaagagtgaggagttttaatttygtttggggtyggattttggttttgttgtttttgggttttgygggttttttttttygggtggaggaaagggtagayggttttgtttttttttgttttttattattttttttttttyggttttttttttttttagtttttggttagaggtggagtagygggaaggyggyggggygggattgygggggtgggggtgggggttgtgtttttagtttgggtgaagatttagaaagttgygggggaggggggtygttgggtggttygaygatgtttygttttttttttagttttttttttttaygygagttttttagtgtggtttttttttggaygttttgggtgygttyggagtaygygttttaygtttttaggttaagttaggttagtgtgaagtttttagttattttyggttttgggaattgaattttttygggatttgtatttttttttyggygttggggttggaaaagattaygtygtatttgttatttttttttttagttaaaatttttttggggggggggtgtaggggtgtagattggttatttgatgttygttygttttagaggagtgttaggaaggagttttgtttgggggyggggaggggtatagaaggttatttttgyggggtttaggtttagtttttttataatttgggttttttygygygggttaagttgagygygygggtatygggtttttttygygygtagttgtagyggaygtygtygygttttagttgttttygggttgttagygttgggtgagggtattttttttygagtygttyggyggttttttgtagttttagttgtttygtttttagtatgtgaygtgggtgataatggtttaggttagagtaagtttttygtyggygygttttgggtggtyggattygggtaaatataaatataaatygattgttaagttgyggataatgagygaaatgtagataaatgtttygttttygttggaagtttttgtttyggttyg

SEQ ID NO: 719 - DNA, 2194 bp, Artificial Sequence
  Description of Artificial Sequence: Synthetic polynucleotide
tygygggttattatttggaygygatttttygttagggtttttttggtttgggttaaagttggtggttattttygygygggttgygtttttttttttttttttgtttttttttttyggggttygygttygttgtttttagtaygygygtyggtaggttyggtaagygaagaggagyggttygttttagggygtttttygtttagtttgtyggttaggygagygygaygagagttttttygtatttttttttttttygggggtygagagggttgggtttygtttyggygtygtagttttygatttttygtygttygggttgtygtygttgtttygygttyggygttyggggtagtygggggygtaggyggagagygtagggyggggagaggygtggggagtagagyggygttgaggggagggtagaggaggagagagtttggtagyggaggagtagaggygggygtygtatygtttygtaygttygttygttygggagagtygygggyggtygtttgggygtatttgtygggttattttgtttyggaggtaagtttagatttttyggtygygggggygggyggaggggttygtagtgggyggggtygyggtaggggtygygagttggyggygggagttggaggttgttttgygttggygggtgttttagttttggtttygtttyggagygygtagattyggyggyggygtggygttygyggtaagttygggtggtygtygygaygagatttgggagatayggggtygtagggygggagggggagttgagtyggtagagaaaatgtttaggaaggggtygatgttggtttgggttgtattttggtgttttgttatttygggagaygygaaggggttgttgtgygaattygatgggagttggtgagatygagaattgagagygtagyggagttaggttgtttagtagggttatgagggygygyggygggttaaggttttgygggttygggttgtttttyggagtgattygaaggagattagttagggttggtgagtygggyggttayggagttggggatttaggtttgtttgggagtaggaagggaaatagattaatttttygagyggagyggtaggtaaggtgtaagygygtttgggatggggaatttygaygggygatygtggyggaagtagagatttttggagttttttttttttagttaggataagatttgtttttaaaagttgtttggtttttggtagtygygatagtttgtagttttgggagttatagttttggygtygagatgggagygagtatataygtttttttggttttaatttgaatttygtttttttttagtygtgatttttgtttttttatgtgtattttttgggtagtgaggaggaaggaatggtttattggatgagttgggtattttttttagggaaggggttttgtttttatgygttttttgtaagattttattagagtggttttggtagtygagttttgaggaggyggttagaggggtygtttggygtttttgaaagaygagaggaaggggttttttggtagttttgtttttttttgggggtttygttgtaygtagaggtttgggygtttggtatttagattttaggtgygtatagtttttttgygaygttagatgygttggygtygyggygtttttggttyggatygatgtttgygttttttttggttaygttttggtgtttagtgtagtagatatyggtygaaggtttggttgattgggggtgtygaggggaggggggttgggygttatatagtggtttygttttttggttggaattagttggtgaggygtgygygygygagttygtgtatttgttygttttttttttatagtttagygtgtttggtttgagtttaaagaaggaggtggtgtgtgtgttgygtagatttgygtttgtggggtgagtagttttatagtttttagagtyggttaattttttygtgttaggttgygattttaagggttgtygygtyggggatyggaagtggtttttaaagaggggtttaggtygygaaattttggtagtagtygaagtgaaaaggagttgttaggaggygggyggggggtagtttgatgttygttttggygyggataggaagaaattgaagtygaatttttagttgaattgygtgttttgtgtttggyggtggtgtggttyg

SEQ ID NO: 720 - DNA, 284 bp, Artificial Sequence
  Description of Artificial Sequence: Synthetic polynucleotide
tygtttagtttygtttttygtttgtygggaygttagagtttttttttttttttygttgttttttttttggygyggattatttttygggtagtaaagtagttgtttyggtttaaygygtaaagtttagaaagttaggagtttttagatggttttggtgatttttygggattatgtttygtygttttttagtttggagagaagttatttygggattttttattttttygttttttttttyggttttgttygagtttaggaggyggygttggygtgygttattttyg

SEQ ID NO: 721 - DNA, 603 bp, Artificial Sequence
  Description of Artificial Sequence: Synthetic polynucleotide
gygygtagtygaagtttagtgttaaggaggtyggagattygggtgttygygtatttygaaaatagtttttgaggggttttttgagtatttttttagygtgtttgggaggtaaattygttgattagtttttgagaggagtggttagaggaatttaggyggggaaggggayggtggattttaggagagtgtaatttataaaggyggggggyggggaygtttaggttygagttttaggattttgygtyggaygtttygttygtttttttaggttttttgttyggttttygtattygygygggttyggagaatttttgagtatyggtttttagttttygggyggggttttagyggygttatttattyggttttttygttatttgyggggttattttygtatattttyggygygtaggtygyggtttttyggagttgaggtgttggggtttggtttgtttgygtygygatatggygygaggatygggtttttygygygtttttaggagtggtttattttatataaygaattttyggagttyggaaattattttttttyggtyggaaygygtatgtttyggtaattttgtttattagtygagtagggyg

SEQ ID NO: 722 - DNA, 6511 bp, Artificial Sequence
  Description of Artificial Sequence: Synthetic polynucleotide
gygatttygggggttagtagagaggagaggttgygggaggattygttgygaagggygaggggtggygttgggtgggaygggygtttggggtygtgtagggtggtttttgggtgttgttygggttgtttgtygtttagtattggygtaggaagaygggttygygtagygtttggtaatagtggtttgttttaygtttggaggygattaagttttgagttaaaggygtygggtttagtygggaagtgtatggygatttagaatayggagyggagaaggttttaggggataygaggttatygttttagttttygggtttgygtttygagyggttagggtgygtayggatgggtttygggatgttagtggagaggtgataggagtttattattttayggttaagygtgtgaggttttyggygggygggggtttttttyggggtagggtagggggagagttaggtatgtttttaaygggttttttagtagaatygttaggaaagtggtttttaattttaggtatttttgtggtttttaggtagttgggygattaaaaatttatttttgtttgttgtgaaatgggataggtggttgttaggttagagattgtgtttaygaagtttygtttggygggtygggattgaygtggattygggtttttttyggaagtttgggaatttgtgagttttttagtttttygttttattttgtttgtttgaaaaaaggagttgtttgagaggaagagttaaggtttaaaaggttttaaaygaagagtatgyggtttgaygyggagygtaaagaagygagtagtgaattgaatttggtgggattgagattagaggygtttgtatgyggyggtygtttygygttttattaaagtaatttgttatttaygataattatttttgtaattattttggagtggttgtgatttgatgtttgtggtgttttagggtatgtttttattggatatagatattttagggtgttttttgaygttagtgtyggtttagtgggtgttagtgtygygaagggagggtggygggygtgaatgttttttttttttgggtttgtygtaggtttyggtttttttattttgtttgattttggygggtttgttatttattgaggtttttatyggygtttaygttgtttygagaggygggataaaygttyggygygtggygyggagtttgygaaagygttygggggtttttattttttgttygggagttttttttttggggygggaagaggagtygtagatttgttygaattttgttttattygtttggtygttttttttygtttggggtgggggtaggggtggyggatgatttaggtttggggtygggagttttgtttttaaaggtattatttygygtttttttggaagtggygygttgttggggygttttygttgttgtagaggtttggtttgyggttttataggggygtgggtttagggtttttagggagtaagtgagtttaggttttttagggggyggtagaggggaattttygataattttttatttttttttttaggyggttgygaggttttyggggttttagaggggtttttttttgtyggtgtyggttgttttgagygyggttaygtagttygygtttttaygtgggtaaggggyggggaygttggagggaggttgttttggatgttggagttttyggttttyggttttgttgagtagaaaagttgaagttaaggaagggttgaggtttttttataagggygygygygtgtttgggtgtyggtttagaagtygagaatgtgygtattggggaagggtttttygtgtygagaagatagaggatttgttttagttgtttttygtatagagggygyggaggttgygttttagttygaaygtttatttattggaaagagggtagygtyggggtttagggaagttttttgggaatgaatggtttttgttaagyggtttyggattttttgggttttttgggtttayggtayggtgttgygygagtttttagtgtttatyggtttttttygttttttgygtagaygtttttaggyggggaggtatatyggttttttygggtagttttggttagtgttgttgtgggaaaggagagttagggtttgggatgggggatgagtatttttttgtttatttygggttttagygtgtaggaggtaaatttgttagtatagataagatagtttgtttaagttgtattttaggtygggttagagaataaaatygagggttagaaggtttagaatgtyggatagtttagyggtattygttagggagttttaggygttygaaagaggygtygtatttttggygagtttaggatttatttttttggatttgtgttttggagtgtttgygggtttgggtttaatttttgtttttggtaggtgtttttttttttygtygttaatattaggagygttgtttttgyggtaatttattttatttttagaagtttgttttgggatygaagtgttagggttttgtgtgtttttttatgtattgttttttttagtgtaaagttttgtagatatgtttggtygaaaagttttagtggttttaatttttagattttgttttygygttyggtyggaaaattatttgggatttggttgttgtttaaggtygggggaaagttttttttggaggaygtttattattattatttttttttaggtttatttgggtttaaataaatgttaaagtttaaaygaattygagaaggaatagygaggtagtggatgtygttatttygtggatgggagagttatgtttattgtaggtgyggatatygtattgataggtattgattattgtaaaatygtatttagtattaaatagaaatagttttgttttttaatttttatagaatgtttaaatttagtttagggagttagttggggygttttaataaataygttttygagaattagygatgttttttttataatgaaagttaattgttgtataataattgggttaaagaatttygttagtttaaattttaaaaattagtattgtattttgtttttaagtttgggtggtaagtatygaaggggagagggaagtagygtttgtgtggaaggaagtttygttttttgtttaaatatgtgggatttgggtgtttatttttttagtygagagttttttgtaggtttttttttaattttttgtatttttttatttttattttattygtggygttygggttttatttttgttyggygttttttttttagggygagtagaggtttttgagtgatyggttygttagaggtagttgtagagtyggygtttygtagggtagggtagggtygggtygttgggttggtttagtgygygygggttttttttggttttagttagtygygggagatgttatttygggygatagyggygagaygtygttgttygtaatttttgggygggtaggatygtttgttgtttttgyggtttttggggtagattttttaggagttttttttttttttttttygttygggggtygggatygygttgtgtttayggagggaattgggygtttttggygtattggggttttagttgtatgattttagtttagattttaagttttagtggggtgtaggtgggatgggatgtgtttttaggagatgaggagatttyggttgttgagtygttttttaaatgygtagttttttaattttaggtgatattygttttttggaggaaygagtgaaggtygtttaggygaaagaggggtgggttttagtatttggatttttttttttagttttgttaattttaggtgtgtttayggtggaggtgatagaaggaaggygygtygggggatttaggtttygtaggttttyggttgttaaygaggtatygtttattgatttygygtttygttttttatagygtggggttyggygttgygttaggttygggtgyggggyggagttaggttgggattggttgggggtygtttygttyggygtttgggttttygygtyggttttyggggaggagttatgataattttttttttattaaggygttygggtttttyggttatygttaggatatattgttygggygyggtttttttygttygyggagyggttttgatattygyggyggtagtatttaygttygtagagtygtygatgygtgtttagtgattyggatagtaaggttygygygyggygggggyggyggtagaygtttggttatygtgatttygattttggatttatygtttgggggttggggggattttggatttaattggygattgttttgggggaygtyggaygttatgttgtggaaaataatygataatgttaagtaygaagaggattgygaggtgagttggggtttyggggtgtagtttygtttygtygaggatagttygggaggtaggggttattggatygaggtyggggaygagggtataggagttttggtttttyggtgggaygggatttattttttyggatattttttagtttatttttgyggggttttttttttgtatagggtttttttttaaatagttttttttygggaaygaggtttggaaagagaatggtaaattttatttatatagtttatygggygtttttttaagyggtaaatagttttgtttttygttttttyggaaaagtgtttygtttgtaatttttagaygtggtttttaygtaygaagtttttgtttaaaggggttagatgaggttatttgttagygatattttggyggatatttttttaaggtyggtttgttatttgtttygttattttttyggggaagtaygaaaataatygaagtttggtttttaaaagaagtgggggttggggagtggtggtgggggtgttygaggttagatggggtygtaagagttygygagtgttttagtttgtyggataggttgagttagagtttyggagagtgggagggaagaaggaggyggygagygggaagaggaagaagaygtaggtagygttaggygagtttaggggygtygggagygyggagttygggttayggattygygggagtttattgygttttygggttttggagggttgtttttgttygtaggttygggygttttygttaggaggygatagygttatgtttttttaggttttyggygtttygagatttttgggtagatggggaygtattttttagaaattgagtygggtygtttaggggygagggaaygtgygygggtaaggttgtttaatttttagggttttttatgttttttttgygtttygaygtgygagaatattgtttttggtagtgtagggygtttttatttattatttttttyggttgggttyggttagtagggagggtygttttgtgygygygttttttttttattttttagggyggygtagggtggygggttttgtttttygagygtygttygttyggaggtttttgtttygagggygtggaagggagggtttygggggygggggaggtgygtatttttygygtygygtattttattygygtttgtygygttgttatttttagtagtttttgygttatgggygggttttaygagatagttttgtatygggygttyggttttttygtttygggttttggttttttygtttygggtttyggttayggatttttttggtttaagatttagggttyggatttggygtttttaagygtttygggtttgggagtagygtttagattttygtygtygggttttgagaattygtttttttaggttttttattagattttttttttttttygtattttttgtttataaygaaattttyggggygtattgttttygggtatttttygattttgggtaagtttygtygggyggggtgyggttggtttttyggggttttttgygtagttyggygatgtyggttagttygtagtagyggggtttygtattaayggggttttttgtttttttttttttttttaggatygttaygaygggagtagtaatgggaattygygggttttttatttttttttygtygggtagtatttttatagtttygygttattttttttttatattggagtygtygaatattagtygttattttattttttttttttttattagtagttggtttatttttagtyggtygatttttattygtatttgggggaagygtaygtygtygttattaattttttgtattagtyggygtttataggtagttagtagtaggtttggttyggtygttagagttaggagggagyggggttgttttygtattaygggygttyggtyggtttattgttttattttttygggttggaggygggygyggtgagygttygtagggatgtttatygtygtttygatttgttgttgttttaygtataygttttggatgtygygggtttggtygagaatttggggttttaygatatgttttattagatggaygaggtgtaggtgagyggygttgyggtttttgatyggatttgtttattttayg

SEQ ID NO: 723 - DNA, 1560 bp, Artificial Sequence
  Description of Artificial Sequence: Synthetic polynucleotide
aygttttgtagtgtygggttttgyggygattattgagttttttygttttygtttttagttttttygttttygttttyggttttygtttttttagtyggtyggggttygtygtttaygatttygtaygtgtygtygaygtygttttgtygatttygtygtaggaggtggaattgtagtggtgtyggyggttttttttttggggyggyggtggygaggygttygttggyggygggtagyggttggatgaaataygttttttttagtaggtagaaggygtygygtaygttttygtagaggttgagggyggtagtygagttgggatygttatttayggtgtyggagtagaagtagtgygttaggtyggttttyggaagyggygtttyggattyggatttgygttttaygttttggagygtgaagtygggygttaaaaagttgttgtygggtygtagttttagatttagttgttggttaaaggygtgtaggyggaggygygtggtttygtgtttyggggygygttttagtttyggtattattagtttttygtttttttyggaggggygttygagtgygttygatayggttagtagygtygyggygagtagtagtagygtgggtattggtttaaagtttygagatttyggagttygtttygygttttttatgtygttgtttagtttgygtttttygaatttttygggtatagttygttgtattggagttttaggagatatygttygtagtagygtayggagygagggatttttagttygggtygggagagtaaagtttygttggtttgttttggattgttaaaattaataatttttattattygttggaagggygygtagagtyggttatagtygaagttttyggagttattaaaaggaggygttgtagttttgtyggygygygggaagttttttttttagygtaaagttggagatattgagaggtaggygtaggtagagtggttttgttgggataagaagygttttggggygttttyggggttgaggtaaygyggagattggtgtttggygttttttttyggttttygttttggttgygatgttgtttattttgtttagggttttttttttttygttyggtagygtattttggttttgtaatagtttttggttyggagtygttttttagygagtgtaagaatygggtagtygagyggtttttttatagtggattagtgaaatttttatttttattttattttttttttttggtttttttttattttaaagaygtygttttyggtttygttggtgttaaatygygtttygygttgygggttygggagggggagggggtagttttygygttggttttaygttattgttygttaatttaggggyggaaggggygttgtgattagtattttgtattgttggggtygttttagggagaagatttttttttttatygtttttttttttygtyggttttttggattattttttttttttatygttyggttgyggtaatttagttatygygttgggttgyggtttttaggagggagggttyggttggagaayg

SEQ ID NO: 724 - DNA, 572 bp, Artificial Sequence
  Description of Artificial Sequence: Synthetic polynucleotide
tyggtttygggatyggtgtttttygaagttttttygatttygggagyggtttttttagtattyggygttygttattattgygtttygygygtyggttyggttttygttggtttygtggtaagaaygggggygtttygagtygggttttttttygyggggtygggttatataaggaaaagttaggttygtttygttygttttgygttttagygtttggtygatttggggaygygggtagtygttttyggtttyggttttygtatatttttgaggattgggtyggggatgggaggaatggggaygtttggggatttgtaygtygygtgtttttttattattygtygggaygttttttgtttyggtttygagttygagttygattttygttatttagttgggtgttttggggattttggttttttttttttagattyggatattgaagtaggyggtagygggtgtttttttatttggttattttttyggygtttagygygaggtagggtgggygaggygagggyggygttttgygagggagggyggtygtagaatttgygggtttttagygtttt

SEQ ID NO: 725 - DNA, 1021 bp, Artificial Sequence
  Description of Artificial Sequence: Synthetic polynucleotide
gyggygttaygaggtygagaatyggygtttagttttatttttgtggttgtagagtgttaagttttaggttttgygtttagggtaggggttaagagtagttggtaagggyggygtagtttgtggggtttttgggygyggygggtygtagtttygggaagttaygttagtttatyggygttgtagttgtagtygttattagtatayggattaggggtygtygaggattgggaattttygattaggattgygtttttagtygtgyggatttyggggttagyggggtagyggtaagttaggtagtttgtagtaggagygttgggtatgggtttyggttygggttgtaggaggygtgtatttttyggtyggataggyggygtatttagggattaggaggttattttaggtgagtttygttagttttagtyggagttygagttgtagttgttatttgtaagtggtgttttggttgtagyggtggtaatttyggatttagttttttygtttygygtttattagygyggattygggggygaygtagtggygaagtygggttgtgggttyggyggyggtattaggyggagaagygttatttaattttatttttgggttgtagagggtttagygyggagggtttygygygtygggagtyggtggaagaggagaagagygygygggygatagttatataggttttggggtagggygygtttygygttttagggagttaygttagttygttgygttttygtagtaatygtygtttgtaygtggyggggygagagagttgttagggyggttttttygtttygggtttgttgggyggggtyggttaaggtgygygtgttygttggttttaayggttttgttgggygtttttgttgagaggygggaggggttgagagtttgtgygaaggtaggtggatagattgtattgtttgttgttgygtttyggaggyggygattttygaaggygagttgaaatayggttggagygtttttaggttatagtttgtagtygayg

SEQ ID NO: 726 - DNA, 1281 bp, Artificial Sequence
  Description of Artificial Sequence: Synthetic polynucleotide
tygaaagtttaaagtttygggtttatyggttagttttttatttygttgttgggtyggataggtgtaggggaggyggattygtttygtagtygatttatttagttttagggtttggtygtatttgagtagygyggttttyggttgttgttggygttgtaggtttygygtttggtttgttagtttgygtagtyggtattyggtygggaagtatttttttagtaggtygtttagtattaygtttaygygtygtatttgyggtygygygggttttggttttaygtagygtttgtagattgtgagttygtagggtagygttatyggtttatgtagtagtygtyggtagygygggtagtygagtaggtygyggggygygyggggtttyggggtyggttttttttygtygggygtttygggttygtygttygggtttttygyggatagyggtyggtygygtaggtttayggygygtattaggtygttygttagtttttttagttttttyggtygtagygtttygagtygygyggygtygyggaaygygtttagggtttyggggaggyggtyggygygggttagygygttttttagttttaggtataggtygyggttyggttgygttagttyggttagtatggagygaaagagttyggttgttatttygtagtygttygygyggaaggtttygtygtttttttttaagygttgggygatyggtttygygyggtygtagttaggatattggggyggyggyggyggygggatyggttyggggtttattatygyggggttgygaygaygygggttyggagygaaggygyggagtagggaggatgygttgttgttgggaattggtyggygggagygyggttttagttttygttagtagttaygygygtttgggggyggygygttgygagyggttgagatygygggygggggygggygtttggtttgggtagygtttttagygyggtgtgggyggygagtttygtagggttgtaatygtttyggggtgggggtygggataggtatygygggygtaatttgagtttttgtttaygygtagyggttttttagtttygtyggtttaggtaatttaggtygttgyggtaaygtagtgatygygttttaggttygygttttttgygatgttttttttattygtttgagggtttttgygygattgygygygygttttttgtttgtygttttttygtagaggtgtyggggttttgggagtaggtggttttggtygygggttgttggygygtyggtatygyg

SEQ ID NO: 727 - DNA, 2029 bp, Artificial Sequence
  Description of Artificial Sequence: Synthetic polynucleotide
tyggaaggygtagttataggaygttygttgtttyggatyggaaggygtagtattttaggttataattttagataygttttygggtttygataggtgttgttygttttttayggggtttygggatttyggttttygggttgttttttgttttttggggygttggagygygygtagtggyggagttggagttatttagtgtttygtaygggygygtttygttttttygggttttagyggaagtttgyggggggyggggtaatygyggaagtyggyggtygtgggygygygggttgggggttttygygtygtttygggtttttttttttttyggttgyggttgtygaagagaggtyggagygyggygttyggttgttttatttggygygttgagtatygygyggggagttttygggggygggyggtggggggygyggattgygggaagaaggtaygaggygtygtygtagttyggttaggggtyggggtttygtygttygtygttgtattaatttgtygtttggtttygtttygtygtygyggttygttgygttttgggtggyggggggyggggagagyggggagttagagggtttgyggtggtygagggagggattttaygayggggagttygttyggtgtygttttttttttttttttygttttttygttttttttatttygtttttttygtygatttygggagygaygggygttygtgatttgygaaygttgttaagtgayggttttygagtttgaagygttygygaggaagygagygttagygygggtygtyggygatgayggtygygaagtaggagtygtagtttatttygggggttagggygagttaggygtagtyggyggattaggtgagagtyggtagtygyggttaggttttttygggaggggtggttttagtgygygtttygttygtttttygttttttaggttgggttttygygtttttttttttttattttttttygtttygttttagttttaggtttttttgtttttttayggattttgygggaagttagagtttttgygtgygtttyggggttyggygagaggatgygtaaggtggagagtygyggggaagggggtagagaggtaaaggttgaaggtgtttyggggaatttyggygggyggtttatygagggagggagaggyggtygggattaaggaatggggttttttggttttttattaaygtaygttgaagaaatttgttgygtttttgayggtygtttatygggttygagtttygtttttttatagtyggggygttygttggttaaagygattygagtaggygaatgatttttaggyggayggggttttttttttgtttttttgttttttttgaggagaygggtgtgtgtttgtgaggtggggatgggggaagagtgttttagatattygtagtttgttgagyggaayggagtttggggagyggygaggtattaaygattaagtggagtygggaaggygttggttttggtgatgtgttgggtttggatgtgtygygtttgtatagatgaggtgttttgygtgggttgagggttatttttgtttttttttygttygtttatattygttaatttttttttgttttggtttttagaaatttgtagtataatygtatygtygtggatttttatttygtttttgtttttgatttggggtgattgggatttyggtgtygttttttttttaaagttggagggtygggagygtygagatattttggygaggaggaggaggaggaggagggaggttgygttgagtygggtgtaggtgygtttaygtttgtattaattaggaatttygggtagagagagttgtatttaggttagggattaattgtggattygygggatttaagygttggggtaggaggattggggatttttgttyggagtgygttgygaaggttgttggaggyggatatttttttagtttattgttagygtgggatagagggagygtaygyggttaggttttagtagygattyggtttttygyg

SEQ ID NO: 728 - DNA, 1793 bp, Artificial Sequence
  Description of Artificial Sequence: Synthetic polynucleotide
gygttygyggtaagggttgtggtygggtttgttttaggaattttgggttttgattyggttygygggtaggtttyggaaggagttgygygagaaggggtygtygygggtgttggagtygttgaaggaygtggtgttgatygaaggtagygyggttaagtttatttgtygtatttyggttttttyggatttatttattygttggagtaaggayggtaaggagttaygtgayggttttaagtatygttaygttttygaggattttgaygtggtggtattggtggtgygygayggygagttggtagatttgggttagtatagtattaaygttattaattttttyggttagtgtttygattyggygygtattttygtggaaggtaygygygtttygggygtagygttagggygtagattagtattatttagttagagttygtagttyggtttagttgygygtgtttatttttgggtttagttatagggttttygttagtttagttttgggtayggtttggggygtatygtygygttagttaagtgygtttttttttatttygggatttagttttattygggttgagtagttagttgtggatttttattaygyggtttygggtttttaaggttatatagtaagttagaggtagagttagggttggattygggttttttggtttttaattttggtaatttttattattyggagyggtttttgaggtatygygagatgtgtgaatatttaggggttttygttygttttattttttttgattttttattygatttygagaagtaggagaggtagggataagtttttttaatagttaaggagatgaaattagagaggttaatgatttgtttaaygttatattgygagtttaaatgtatttgtatttagtgtygggtattagtyggtgaggtgatgttttgttttattttygggttttttayggggtttygttttttttttttttygttagtttygaygaagatttaaaagggattygataatattaaggygygtaaaggtattatygtgaygttgattgyggagattttgggagagtttgygttygaygtaggttggattaaggayggggaggatatygaggaggatgataggygagggtygggatttgyggtayggttagggtttggggttggaatttgggtgggattgagtttagaaatttggttggagtgaygggggyggggattgggtagygaggaatagagttggttaaggagtttygtttagtgygttygtgtattgattayggtttygttttttttttygtygttttttygtagggtgtttttygagatyggtagtattattaygaygttgattattygtygggttaygttttaggatagyggtaagtaygaggtgtaygtggagaatagtttgggtatggattagagtttygttygygtygaygtggtttgaayggtattttyggatttttygttttggygtygagttygggggtggtgggatttatagttttttattagtttgtttaataaagttgttttttgatttttygygtttgttttgttttttygygtygttattttttttttttygtattagygtttataygtattttagatttttaygttaaggttatagtttgttggagttatagggaggtttggagagygtttagygtygtgttgtattttagatagttaaattgataagagttgttttygtygtttaaggygtttttattttttagyggtatygtyggttgggtttgggatttygtttttttygtttttgagyg

SEQ ID NO: 729 - DNA, 2697 bp, Artificial Sequence
  Description of Artificial Sequence: Synthetic polynucleotide
tygyggagaygttaatttagttygtyggygygttttttttttttggtttttattgtttgttagagggttgggaaattgyggttttygyggtttttttaaatatygtaattattttagggaaattatttgygtttttttttygygttttgtttttgtgygttttttttttttttttttttttgttygtttttttttttttttttttttaygtattygtttttygygygtagggatttttgggtaaggttattgygtttyggattygyggtygttggtagggygtttagggggygtatttaygyggatgaygtagygygaggagtttttgtygtttaggttgatygtgagygagaagagygyggyggygttgtataygttttgygttttgtatagtagtyggttgaggttttatygygtygygattttyggaygttttttygygtygtttaggttttagttttygtagttttygatgatttttagtatgggtygygggtttagtygttygatttygygtatgtygaggtaygagyggaagaaggygygtattttgygttgggtygygtygttaggtttattttygggtygygttagtaggygtygtaggygtttttygttttgttygtygatggtygygatggtgttataggtgagtttgtygtyggggatggygtggygtygtagttaatygtygtaggygaaygagtagaagttttggtatgggtygatgttggygtttaggttggyggttaggaagygagyggygygygygaaggttttgygtttagggtagttttygggataggygtygtygtyggtygygatygggtttaggtatttgagggttagtatagtygttagaatggygtagaggtyggyggygaatattagtttygatagtaggtatatttygygtyggttttagygyggtagttyggatygggtttyggtggygttgygygtagygtttaaygggaagttygggggtagggaggtttygygygygtttttygygtygtagyggtttaygtatttgattttttggaatttatygtagtgygtygttagygaataygggggttttatggygtygaggtygtygyggtgtagatttgggttatttgggttaygggatgygygtggtygtyggttttttygtgggttttygtatggttttggggtygtagttgygggaagggyggaagtaggtttaggaggygtygtagtyggatggggtttagggttatygygaggagggatataggtttgggtgtagaggttttagtygygggttttatttattgyggaaattagggattatgagggttyggyggggttattattttygggtgtatagtggagtttttttttttgttttttttttgtatatatttgagggtygtagggttgggagggtttttattggaagtaagaggygttaggtaaggggtttggtaygtagtgggtttttattgaaaggtygttttttttttttttygttttttttttttaygatttgttttagttaaggtygggtggagtgggggaagaagyggaggttggagtgaggaggtgyggttaggggygygtttatgygatatttttagtttttygygttggatttagatagaygtttygtaaagyggttaaagaattaaattttgttttygyggaagttygygggatygattaygttaatttygttttttggttttttttgttyggtggttygayggtttattygttttttttttaggggygygygttaaygttttagggtggyggatatataatttatttattggayggttttgatggagaattygagaygggttttttttttttatttttattatttttgttttygtttygagttatttttggttttaataggttttttttagaatttaaatttgggygaagttttattttyggyggggagygagttggttggygattttygagtttyggygtygtgyggygtagttygyggagttygagagtygagttygggagtygtagtygtagtygtagtyggagtygtagtygagaggaygtagataaagtygggaggtttygygtagtggyggyggyggygayggaagtggtygyggtggtggttttagyggtagggattygggygttatttattyggtaggtgygygttygagtyggyggtgatygagygggtygggttygagygggggtttgagtygtagygtagtygagygggygttyggtgttttttagygttygtygttttttttgtygtygygtygagttygtygygtygttygtttgtyggttygagggagggggygygtyggyggttttattttttttygttygtttygygygtttttttttttttttgtatttttygggttatttggtagtggggyggtagygyggaygtgggtyggyggtygyggagataggttttygggggtygtgygygggttgyggtyggggatttygggtttagtygygtttygagaygagtgagggtagygagtattttygtgaagggtttttttygatttagtgtttttatttttagtygtttattagtyggttggaaaggggttggagttggagatgaggagtygaggattttttygaagggttgggggyggtgttagtagtgtttgtgtttgtyggtatagtttttggygtagagygtatttttattaatyg

SEQ ID NO: 730 - DNA, 1384 bp, Artificial Sequence
  Description of Artificial Sequence: Synthetic polynucleotide
gygggagtattagyggtttaygtygaggaagataggygtttttttttggggtgggtagygtaggtttggtttgygggtggggggtggagagtgagaggtaygyggggtattagtttagtttttttttggggatttygtattygtagtttaaggaatyggtggagtaygaattttatttttgagttggygtaagygttttttttttatggagatttatttyggtttttttttgaggttttttttttaagtattttttttttygagtatttagtatttttttaattttagtayggttyggggtattagttttttagggygggggttgttttatygtttaagggaggggatagagggtyggtttyggtttaggygatttttgtttttygttaggggygttattttggttttttttygattgtygttygtygttttygttttttyggggggtgtgttttygaagtaygggggygygggaggttaagggtgtttttagttttygatygagattttttttygagtyggyggygaatggtaggttttatttaaagagtgtttggtggygygyggtgttttttttggagtagttttyggygttygttygtyggggtttyggygatygttgttttttttttttttttttttttttttttttttttttygtttttttttttygtygtttygttatygtygyggttagggttggaggygtygttgttatttttgtgtyggaggaatyggygttgtyggtgtttgggggtyggggygygggygaagtygggtygyggaggatataataggtagagtygggggtgttyggtygygygtttttygygtattatgtagttttttgttatttttttygtttttaggttaaaattttgagtatgatggaagataataagtagttygygtttygtatygatggggyggtttagtyggttagttaggaggtgattaatttgygagtygaatttayggttattaatyggagattggyggaattgagyggyggyggyggtttyggttygggttygggagtygyggttagygtttyggyggygggggattyggyggygaygaatatggagaatttttagtttggagygtaaggtaggatygtttyggygtttagggyggaggaaggygagtagagtaygttyggtttyggaggtggtyggggattyggggttttttatattyggggygaaatygttttgtattttggtttgtaatttttttygttyggyggtggttatygttgtttttyggttgggagttgtaggttgttgttatttaygaaaattygagygtagtgtgtayggggttatayggttatatyggtttyggttagtttgagygaggygtagtyggygggtttttttyg

SEQ ID NO: 731 - DNA, 421 bp, Artificial Sequence
  Description of Artificial Sequence: Synthetic polynucleotide
tygygtttattaggtttaggtttgggttaggygttgttttggyggygttagggaggatatygtgtttagagttyggatttagtagttyggtttygygttttttttgtttygyggttygtaggtttagtttttaagygtttagttttygyggtttttgtggygttatagttagtttgaagaatggttgttttggagaygtaaatttaagagttttgtttttggagttgagaattgtagygyggaggtttyggagygagtyggggtagtyggggtyggtgggtgygttygyggttyggggagagggggygygyggggttygtgagggygygtgggggyggyggtaggggtgygaaattagggttygaggggygygygtggtygggagyggatttgtaaggygttttttaaggttgttygttyg

SEQ ID NO: 732 - DNA, 2606 bp, Artificial Sequence
  Description of Artificial Sequence: Synthetic polynucleotide
tyggttttttygttttttygattaatggttgttaygyggtttttttaagaaattaggaattygttyggagtyggagtttaaaatagatttttttttttgttttttttttgttttygygyggygaatggttygygtyggtttatatttattygagatttttttttyggayggtaaggatgtgaggtaggygagtyggaygtygttygtagtatyggagagggygtattgtaaaggygggtagtagatygtggagagttygggagyggagttggatatygtttyggagggaagaaatgaggtagyggyggttttyggattyggttatgttygttttttgttttyggagtttagygtygtttyggttaggttagttyggatattgagygggtygagygygagttttyggygttyggyggagygaagatgtagtgagttttygygggattgttgygyggggttygtygyggttagtyggatttagtattygatygtattttgggygagttgttgatttgagattagtttaaayggggggttttttatttttagtatttttyggaggtggggagtatyggtttttaggtatattygttgtagagttttygygggttttggttttagttttgagggttgtgtgtgttaggggatttattttaygttygtygaggagtttttgtatatttttgtattatttygggtgttgttgttggggttttttttatttgtaygygygtttttagttttttttttgatattttttattttaygttygtttttttttttttgtattttgttgtttgtttgagattttttgttttygtttttgtttaggttggggtaattttgtgtgygygygtgtttttttygtattaattttttttgtatattygaagttgaatatttttttttttagagaatttattygtattttttgyggggtttttaagtattttttttgtttttttttttttaattttttattatagggtygtttttagtagttttatttttygattttgttygggtygagtttggtaggggtyggtggtttagygggtttygtattyggygtttygtygtygtygtygtttagttgygtyggggygtttttyggagatgttgtygtggaagaagtataagttygagttgttggtygaggygtygtygyggtaggygtttaagtttaagggttaygttgtgagtttgtattattyggygtttagttygttggygygggygtgtttygaaggygygtttagtygggtgggtagtatgtttygttttaagygtaagaagttgtatattattagygaggatttaatttatatygtgttttatttgggtaatgttattattatttaggygygyggygayggttgtatygattttgttgtgggtaagatttggagtaagagygaggygggtygttagggtattaagatgaagttgayggtgagtgygtagggtattygtatggtgtaygtygaggagygygygttgygtygttygggttatttttatttgttgtatygygttatttattgygtggtygaygygyggttgtttaaggttttygtttgggtgtatyggtaygagttgaagtataaggtygtgatgttgygttgttaygtygtgttggtgtttaagttygaaaaggygtaggttatggttttgttgttttattagaygtyggttaaygygttggyggaatttaaaygttttaagyggygggaygaygygygttattagtagtaggagttggtgggygtatatattatttygttagtgtygttgygtaagttgtttttatayggattttgttgttataaatygtyggtggagygtagtygtagygygtttaagtttggttttattatygaggatttgttyggygaatagttggagtaggagttgtaggaggaagaggaagaggagtaattygagggttgttyggaggaggaggagaatygtgyggtagagggagatttagtagaggaggaggtygaggygtagygtgygttagtggtygttatgtattttgagtgyggggatttgttggatattttggagaatggtygtggggaggygttaggaggyggygggggttttttgggttygggggtygggtygtygtttttgttgttgggtagygttttygatatgaaggttgagttgtygtaatttattagygatttgggygagtttagtttyggtaaygaygtgygtattttgtaggtygatttgygggtgaygygtttgttgttaggygatagtaygggtagygagagttttatygagggygggggttttgaygttattttygttatygtyggggattygtttygttaggtygayggygttagtgtagaygagttttattygggttgagttttttygygygtygtyggygttttatygtggttatttattygtggtttygataatttttttgttttttgttygtttttaggaagggggaaatggggtatttggggtttagatttatatttggagtttaggtttagygttttttygatygtttttttttatttttyggttttygttttygttttagtatttttggttttgttgygygtggggatgyg

SEQ ID NO: 733 - DNA, 1094 bp, Artificial Sequence
  Description of Artificial Sequence: Synthetic polynucleotide
gyggyggattaygatttttttttgttttttagygttaatttgaagygggagttggttggggagtagtygtatygtygygttttgygtgagtygaggttgttyggttygygggygttygggaygyggggaaggtgggattttgtgyggggggtagagggttygyggatatttyggggaaggggttggtyggaatygttaggggygyggtttttttagttaaggatyggttygyggaggygygttaggagygggagagggtggygygttyggggygtaggaatttagygtagtttaggttggaagtyggggygttgggtattatagagttygggaatggggygygyggagagyggtygttygaggayggygttgyggyggttgtagttygggatttattgttttatgttttttttttttagggtgtttggatatgttgagtttttagggttagtttatttttatygtygatyggtygtagttgtattgygtagttttttttattagygagttygaggagtttattattatttattaygattaggtttttatygattgttagggyggygattttttgaaggtgaggygtttayggttagttaatttagtyggagggyggtaygggagggttggaaagggttggggygttgtatttagygtggggttgttgagygtaggtagttagtggtattttttagatatttygttggtgttygagtyggagaggygygttygaggatttttatayggygagaatttygtttttattygaagatttygatttatatatatttagtggggttggggtyggtgtttttggaygttgttatggtttaaatttttttttgggygttttygaggttttaggaatttttaaagatttgaattygtagygyggaattttgaygtaatttagggtygaggaaaaatgattaaaatttaataagttygagtgttggggtttattaagygggtygttttggttagaaggttygttttataygttttatatttgagttygtttygtttttgttggtttaygttyggtagagtygtttygagagtatagaggttgtttttagtgygygggtgattyg

SEQ ID NO: 734 - DNA, 2168 bp, Artificial Sequence
  Description of Artificial Sequence: Synthetic polynucleotide
tygygttgtagttaggtagagtttyggggtagttygtttatygyggaggagttattttggagttttaygttttttttatattttatttatggattggaaaggatgtttagttattygygagtttgtttgatattgggatggaaagttatagttygtaggttggagtgaggygygggaagatgtttggtttttgtttygyggatttggtagtygygttttgygggtttgtttattgaattgttgaggattygttygtgtgyggggattygagtgttatttttyggagygttattttgygttttagtttttaggttagataatatttggaaggtagggtagggttgttttygtttttattttttgyggaaggatggtaggattyggygtagygaygtagtagygggagggtatagygatttgtatttttagtttttttttaggatataaggttgattttatttttyggatagttgtaaagtttttgttagaattaaatygaattygygtttyggagaggggtttttggggtygtttygttgtagggygtggggagtggagagagggaaggggaagtttggggttgggtgtgygygygtgggagygygtttyggagygtttygtatttttttattttattttygggggtagtttgggaaggagggagtggtagtygygggaatgagggagtaagagaaatttttttaaagtgaygttttaaataggttyggatttagaattygaagttaaaggttgttagaaattgggatttttyggttttttttgtagttttttttttttygtttygaagttygggyggtttgttggttgtttgttttttygttttyggtttagaggtttttggttggygggygtttygtyggtygtyggttttttttttgaaattygtyggygtatatgaggtygttgttttygtygtaggygttggyggttttttygyggtgttygtggtgatgttatgtttygttattaygygggaggagaggagggyggygtygtygggttttgggtgaagagyggygtagyggyggyggyggygggyggggggygtttgggtagyggtatgaaggatgtggagttyggtyggggtagggtgttgttgaattyggtagtygttaggggygayggtttgttattgttgggtattygygyggttaygttyggtggyggyggyggtggtttgagggagagtygtyggggtaagtagggggttyggatgagtttgttggggaagtygtttttttataygagtagttagagttgtyggygtaaygttaagtatyggygggtgtagaattatttgtataaygtgttggagagatttygyggttgggygtttatttattaygttttygtgtgagtattygygttttttgttatgttygttgtaggggattattgtttttggttttttggggygtgtttygygttygygtttttgggttttygygygygtgtataygtggtggtttttattttttygtaygtgttygtggttttttttttggagtttttttttttttttagttttattttttttatttttatagtttgaatttttttttygaggatatttaatgaattgttyggtagttttaggttttyggggygagagttaggtagaygygggatttaggttgygyggataattgggagtaattaggttttaagataygtaaattttaatygaayggggygttygggagttagggaatgtaaagggaggataggygttygtgtgaggtttgagagtatattggagaggttaggaggtgatggyggggtaggayggggagaagtgagggggtatygagggttaggtttttagttttaggggyggagtaggggaagttgttatttggagagagttgttaggttttaagygygttyggaaataygtttygttattatttagttattattaayggaaaatttgttagtgtatgtagttttttttgttayggagaaggtggttaaggtttagaggaggttagtaggttaggygaagtaaygttttygygttgtagggggyggggaggtagyggggaatttggggygtaggaaygygggyggaggtgygatagtagaagygtaaatgggtygtttttgatagagatygggtagtgggttaagttttygtttgtggygyg

SEQ ID NO: 735 - DNA, 1204 bp, Artificial Sequence
  Description of Artificial Sequence: Synthetic polynucleotide
tygygygttttattttgagtaaattyggagtttagagggttgtagaaataygttygttaggygttttttgttttagaagaggaggtygtatggatgygttttttttttagagattttttygttatagtygtttygtaagttaagattagagaattttttttttgggtggggtagggggaygttttyggttaaagtttggattgyggtttggygtttyggtagttattyggatgttygygaggatygtggtttgtttggtataagagttttattgttttttagttyggagtttgttggggatyggtaatttgggyggtgttggaagtgttttttgaattttttagtttttatttattttttgtaatttttttgtaagtttaattgatttttgatatatygtattggaggyggggtgtgtgtgtgggtaaatttygtgtgtggtgggtgatattgygaagtgttggtattgyggtygttttygtttttaggtggtygyggtyggaaggtgggttatttygtatttttgyggtyggggatygattttttttygygyggyggtygttatatttaygggattygaggygggattttttttatygatttgaaaygttttgtttatagtaggatttttttgtygaattgygaaggtttgygttgygtggggattyggtgaattttttttgtagygaaagtaatttagatggaygygggaattgaygtatyggtatagaggattagygygtttttaagtygattttygggtyggtttttygttgttttttygtaatttttttttttttaggattttttygtyggagttttggtttatygtgattttggggtttagaattgttgggggtttygtygttggagtagtaggggagatttyggggyggaagagtyggtgygggtygtygygtggtttygagaggygtttyggggtygtagyggattgttagttygyggttaaggygtagtaggttttygatygttttgagtatgttgttygtttgtttygygtygtattygtattttyggatttagttataggygttgttttygtagtttttttygtttygtttyggtttgtygygygttggagagtttgggaygtgtagttggaatttttggygttygtatatttagttygttattttygttttygttttyggttagygattygggattagggygttaagtttyg

SEQ ID NO: 736 - DNA, 1770 bp, Artificial Sequence
  Description of Artificial Sequence: Synthetic polynucleotide
ygttaaygttttgaatttattaygtagattttagtattggaggygtyggygatyggtattygtttttttyggtatgggygtttyggaataattgggygtygtyggtttatattttgttygtaatgttttgtattttgttgggtttgttttaggtttttagtttttttttygttgtttttagttaggaagagttygagaggygattggagygttaggttggagaagtgggtttttttygtttgttaggttgtygttgygattttattttttyggtaaggggtygaagttttygggyggggyggggyggaggatagtaygaggtttaggatttttaygttatttttgtagtttygygtttttttttttagttttggtygggttttygygttttttygattttygatygtaaagtyggggtgygagagggaaagggaagtgaggyggtaygygtatggagggtgtgagtgyggatatatatatagggtggttaggtaygaaaaatttygttttttttygaattttygtttyggattagttgtagttttattattttagggttttttgygtygggataaagttgtygyggtttttttgygttygyggagygygtygtygttygatttttttagtttttttyggtygtaatttygttttaaaggattygtgggtygttttagggayggaggggattyggagtygggygttygtagttttygtttttygygttttygttyggygtygtygtttatttgtttagtattttgyggattttttggygtaygttagttygggaggaggyggataggttttygtygtygtygttgttttyggtyggtaggttttygatggtggttattatatggttyggyggggttggygayggyggttgtagttgttgttgyggttgtttaggggggattatygyggtagaggttgaggygyggyggygattagaaygtagtygggtgtatygtgtgtyggtttygggttygggaaygygtagaggattyggtygggyggtygyggttygggaggyggtgttgtttgygaagyggtgaggyggggaggtattygyggttayggtygtygtygtttagttygttatttatttttttttagttttagtgygygtattttygygttygtgtygtygtygtygtygttygtttyggtttttttygagtygygtttttaagttttggttygtttygygaagtggttgygaagggtgtygygygggggygyggagttgtyggtyggtttyggggaaggagttttgatttttttttgttttttygtgttygggttttttyggggygygyggyggtagttgtgttggygtygttttagtttgtgtttygttyggtyggaaagttatygtttgtgttttayggagtgagagatygagggtgaattyggagagtygggygggggygtyggyggyggyggyggyggyggyggyggyggyggtagagyggggygygggygggggatttgygygtttttttttygttagagggygttgtygaggtgttttgttgttttygattttttattgtttygttygtagaggtttayggtttaggttgtggtgattgttttggtttgggtgttttttagggggataagggggttgggaatagattttttttgtggagttggyggggatttttygtttttgtttaagygtygyggaatttagtattatyggtttgggatagyggtaggaygtygagataggtgtyggtttyggattagaaatttaaaygg

SEQ ID NO: 737 - DNA, 1834 bp, Artificial Sequence
  Description of Artificial Sequence: Synthetic polynucleotide
yggattyggyggaaaggagtttyggaggggaattgagtgtttttagttaggtaygttyggggagatagygatgttyggggagatygygatgttttgggggatygygatgttyggggagatygygatgttyggggaggtygygatgttygggtagatygygatgttttgggggatygygatgttyggggagatygygatgttyggggaggtygygatgttttgggggatygygatgttyggggagatygygatgttyggggaggtygygatgttygggtagatygygatattyggggagatygygttggtttatttagaagttttttggtttatggggtaagtagtagtygtaggaagyggattyggaggaaaggagtygyggaggggaattgagtgtttttagtygggtatgttyggygagatygygatgttyggggagatygtaatgtttygggggatygtaatgtayggggagayggygatgttygggggtatygygatgttyggggggatygygatgttyggggagatygygttattyggggggayggygatgttygggggggattaygatgttyggagggatygygatgttggggtagaaygygatgttygggggtatygygtyggtgttattagaagttttttggtttgyggggtaagtagtagtygtaggaattagattyggyggaaaggagtygyggaggggaattgagtgtttttagtygggtatgttyggygagatygygatgttyggtgagatggtaatgttyggggagatygygattttyggggagatygygatgttyggggagatygygttgttyggagagagggygatgttyggagaggtygygatgttyggggagattaygatgttyggggagatagtatyggtttttttagaaattttttggtttgaggggtaagtagtagtygtaggaagyggattyggyggaaaggagttatygaggggaattgagtgtttttagttgggtatgtttggggagattaygatgttyggggagatygygatgttyggggagatagygatgttygggggtatygygatgttyggggagatygygaygttyggagggatygygaygttyggggagatygygatgttygtttagggagatygygtyggtttttttagaagtttttttttttttgaaattygttgtagtttataattttttaggtttggttttygttttgtttaggttatattttygaatttatygatttattttgttygggattagttagatagtaggtgtagaagygggaggtatagaaggaaygyggggttggyggtygttgttattgtagatttggagtttygtggataggaggygttgatggtttttttygaggtttatattayggttgtttataaagttgtttagttyggttygtygygygtagggatatattgggygggattttaggtatgtatttttttggggatgttttatttygttaygtttygggttygttatttgatagyggtttggttgaygtaattttttttttygattygttttygyggtttggtggyggygtgygygggtttygagygggttaggaygtygtttttttygttttttttatggttttattaaataattttttaatatagtatttattattattttagtgtaaatattgatgtataggaagatgaagaaatttgtataggaatatttagtggyggyggtgtttttttgttatygtttgygttagygatattygtttttttttygtttgtagtygygaagttttygttttttttygtttagggygtagtygtttttttatttyggagyga

SEQ ID NO: 738 - DNA, 950 bp, Artificial Sequence
  Description of Artificial Sequence: Synthetic polynucleotide
ygggttttygggtttgtttttygtayggayggtaagtgggtggagagtaygttttttttagttgttyggygagagaatttgattttgaaygtagygygggttgtaygtagaattttygggttgggtygygygtttygggttttttgygygtattttygggtygygygtttygyggttttygtagttttttaggttttttttttttttttttttttttttttttttttgtygggygyggyggttatttygaygggyggygygggygygggtatttgtagaatgtyggygggtyggtttygygtatygtgtagtygttgggttygttttttaggtagtagggtatttgttggtygtggggttgtaggaaaggygatagttgyggyggygggtgtagtagtattagygggttyggagataygttgttgagtggggggaaattttttaggtygttggagtygaaygtygtagttttagattyggggtygtaggggaggtyggtttgatygtagatttgygygttggyggyggtygyggygttgaattygtaggyggygttttyggggtagttgtatayggygggtttgttgttgtttaggtatatttygtttaggggtygttttagggggattttgagttgyggayggtttaggggttttagttygtttttttggatttgatgtagtagggttattttagatgttttggtgtggagggttatggttatggttygtggtygygggtagggtgtagatygtgttttygtagggtagaaggtttagaaatyggygggttatttggaaaaagagtatagttygaggttagaggygaygtagygtatgtttygtygataygygagttttggtttyggttttgtttygggagtttgygggttyggtgaagtygggygattygaygggagtaagtgtagttttaggaygaaygtttttygt

SEQ ID NO: 739 - DNA, 1218 bp, Artificial Sequence
  Description of Artificial Sequence: Synthetic polynucleotide
yggatttaygtyggttttgttaygtgttgttygtagttttygttygtttttttygygttggtaaygggtattgattgttygatattttagygatygtagagatttttttaatgtygggygtattatyggygggttagyggtttygttggtttttttgatatattttttatagttattttttttagttgagatttttttttttaatatttygttaattaaygtgtaattttttggttaaaatgttagagttaagattaaatttgaagaaaagaatgaaattataggaagttttttagatttagtygttagtaaggttatggttygaagyggtgtaggggyggygygtygggaagttattggtagagttgtgygtattggggggtgttgtaagygttggggagagtgtggagaggttgygtggagttgygygttyggggtgggagttgtatttttaatgaagygygtgaagggtaagyggtgatgggttttgygttagtggggttgggagygtgttgggggttgtaygtggggttgygygtaaggtgagaattgygtatgtgggtttggggattgygygtatygaaggttgtaggygttggggagggtgttgggggttgtgygtggggttgtttttatyggaagttgtaygttyggggaagygtagaggyggggtgttgygygygttggggagtaygtggggggataygtagggggataygtagggattgttygygygaatggtttygaaygtatgygttttattttatattttatagtygttatgaygatygggaggttygttygttaayggttagttaayggttgyggggataagttygttgaggttgttaggygagttaggtttttttggatttygtttgattyggatgggttgtgtttgaaattgatttagttttattagggattatgaagaaataaggagtaaatttaaagtygttgtaattttttygttttagttygtttaagyggtygtayggggtttttttygttygggagttggaggtggaaaagtyggttttaggyggygggaaattgttagggggygttaggaggtttttttyggggaggattttaaatttgaaaaagygaaaaggtttggagttaaaggtggtggttaagatttttttygattttttttagttygttygtaattttttggygtagtttygggaagaggtgtaygaattgtaggygygg

SEQ ID NO: 740 - DNA, 795 bp, Artificial Sequence
  Description of Artificial Sequence: Synthetic polynucleotide
ygggyggaggygtagagttttaattttttattaggygattagtygtggaaagygggygggttttttagyggtaatagygattattatttttygagaagaygyggttagtaggaygtagggggaggyggtggtagygygtttttgtttygygtttygtgyggggtttttgttgtygatagttgttgttttgatagaggyggyggyggygatagtatagagtayggaggggattyggygagttagtttatatgttgttttgaygaggtggttgtttaatygygggttagygatatatttatttaaggataatttttagggtttattagggaattaggaattttttygttttttttttttygttttttgttttygygtttggygtttgttygggggatgtttaggygygggtatttatygttyggtygggggygttttgggttgttggttgtagtgtgaagatttagtagtagtygtygttatygtygttgttttgtggggagagtggyggggagtttttgggagygttaaagygttgttttygttgtagtygggagagggyggaggaggagaygggygggtyggggtgaggatagggagttggggaygyggygatttgtgtttgaggagggtagttagygtttttgttgggagttgtgggttyggggttgtttaggaggtttaggtgtgttgtggggygaggttaggaggtgatagttgtygttgtagtygyggggggttttyggggttgtaggattygttttttttatttttyggttttagtygtttagtttttyg

SEQ ID NO: 741 - DNA, 686 bp, Artificial Sequence
  Description of Artificial Sequence: Synthetic polynucleotide
yggtttatttttygatttyggggatygaggggttggaaggtggggagaygttygaattttatttgtgatygtgagtttggtgttyggttygaagtattgttygtaggagtayggaggtgtattttygtatgtaaatttttaaggtttttygagtttttgtttattttggggatttagtttaggttttttagtatagggtyggatygggtgtygygaagtagtygtygttttttatttgaatttygtygttygggtggtttygygaaaatttatttagtayggttagtttgttgtyggtttygaaagttaggaygttggttttagagtatagttyggggatttttygtaaaaattagatttaagtygttygygttygygttttagtagttygygtttatygagtattaggagtygygtgtttggttygaagtattgggttttttggttayggttttygagtttygtataaaaattygagygtagtttygttttyggtttttyggyggttttagtttatttagtattgagagtygggtttyggygtygaagtattgaatgtttttggtttatagtttygagaygyggtatagaaattggttttgygaygttttyggygtttyggggygttttttttttagtttyggggttttagygggagttttygtttatygagtattgttagtygg

SEQ ID NO: 742 - DNA, 1565 bp, Artificial Sequence
  Description of Artificial Sequence: Synthetic polynucleotide
ygtttttagygaagtyggygtyggaattgttttaatggaaattagtygtygggygtttygggagggtttaggtygatttyggggtttattagaggygttttaggtygagggagttygyggyggttggaaggtgaatttgatatttyggttttatygatttygtagyggttygtattttatttttatttyggttagattaaagtagaattttgggtgtgygygtgattttttagggagggyggattyggggttttttttgtygtattttttattgggggatygtttttaagttttygagagtttttygggtagagtttttagggtttagagtatgggaggatttggtttgtttggtggaggygagtagtygaggggtyggtggagttgygttttaaatgagttttyggygygygatttttttygatttygattttttgttygtttttttttttttygtttyggtttttggtttaggggatttaggyggyggyggyggaggtggtagaggttagagtttagaggygtagttygggtagttaggagggtygtaygtggagtygtttttyggattygtatagygaygaaggggggaggttgtaggygygyggggtgggggttggggygtagttygagaagtgggaggggatygggtgaggggtggtttttgaggaggagttaggttggatygtattgtttygygttyggtyggggagggygyggggygttyggtttttygtgttttttttttygttttagtttygtgggygygagaggaggyggggggttttttgtgtattagagaygtagttgttttgttygttyggtggggtgtggatttttygagyggtgttgggaagggggttttttttgttygygygtttaggattttatttagggyggaggtttygagtgggtygtttttygtagygttttgggttygygggtttagaggttggaggtagyggggagttagggttttttatttttttttygtygygtgttttygtaggagtygggtttttygtttttygygatggtygygggtygtagtygtayggagtygtygygyggatttyggggygtttttttttagyggggygtagtttttttttgtttttygttttgttagygggatggggggyggygggtyggttttgagggtttgygtygattatygygggggtattaattggttgagtttgagtttygaygggtagygtttgttgaygggtagygaggayggtayggttyggttttggagtatygyggayggttagtgttgygygtttttgtaaggtagatttttttattttttttttgattttttygtygtagtttatyggttttagatygyggattttagtttttgygttygtagatttttttttagaagtttagttttygtttatttyggtatattagyggaagagygtttgtttgggtttagtatttggttgttgagygtayggtagggtagggtgaggtttgggggtggggtgygggtgtagagtagggtgyggtygggatygggtgggtgggtygaggggygttygttataaaggyga

SEQ ID NO: 743 - DNA, 1911 bp, Artificial Sequence
  Description of Artificial Sequence: Synthetic polynucleotide
ygttttaygggatggagagggagtgggtgggyggtagttttygagtyggggatttyggttggtttttgtgyggygtgayggggtggttggttgagttttaggtttttttygtttgtygtaggttgggttggygttgyggatttaagtgtagttttttttygyggggtaygggygtaggyggygtttttagggaggygtgygygggagygtyggggatgggggaygggyggggttggagyggggatttatttttttttttgttttaagaggatttaaaggaaaataatttatttgattttggataygtttttatttataattyggaaatatgtaaatgaaaggtttatatggtttgaaaggggtaaattaagtttttagygtgyggygyggggaatyggtttttttttagggagtttyggaggygygygttttaygtygagggygttyggggaggaatygtatttygggttygggagtagygygttygggtttttagyggttatygttygggggttttttaagttyggtttttgttttttgtygttygttttttaggtygagttttygttttygygatgtygtygygttygtygtygttaggygygttggttygtygggtygttygggygyggggygygtygttygtygtagtttttttttttttttyggtttggttttgyggttygtagyggggttyggggtagagyggtygttttgttttygtygttygayggygyggggttttgtaaaggyggaagttyggygttygttatgatttygtgyggaygtttagtgygtttagtttygtygygtyggtygggttttygggttttttygygttgagygttygaattygtttttttygyggtygtttatygttygtygtygtygtagtaygagtygttttttygttttygttttttygtttygtygtygtygtygtygtaggagagggagggaggyggagggagggaggyggygggttttgtttagagttygtttygggygtyggtaagygagtttyggtygyggyggtagygttatttygggtygygggtagtygtttttygtttttygygttyggaattgttttygttttttygygatttygtagtagtyggttttyggggygttaygaaygttgttttttttgtggagtagagattttttttttttttttagggggtgtygtttyggggatygttgagygttaggggtttaggaggyggggaygggagygtygtgattygttatggtttaagyggttaaatagttgaagaaaattaaagatatygaggygtaggttttttaggagtagaaggagaaggaggaatttaataggaagyggagaaatygttttygtgatygaaagaagaaggtaggagggggyggyggtgaaagtttagygatygyggtatttgtaagtggttgttgggggtaggggtygggyggttygggaygyggtggggygyggygttyggtgyggyggagttggyggtattygagyggggaaggttyggtgggygtagaggagggayggaggtttttgygyggtygggaaggggatagggyggtaggttggaagggtagagygggtggtygggaggttgagggygygtagaattttttygttagttgttygtagagattttttagtattttggatagtattyggtaggttygygttgttttaggattaattttttyggttttggttgtyggttgygggtggtgggttgttttgttygggygygtygtattygttggttttttaggagagttggtttgggtaaaygyggttgtaggtttyggggagygggtygggggggggtagttttgttyggtttttttttaggtgatttattttgaygaagagagygttttttttaggtgtttttgaaygagagtygg

SEQ ID NO: 744 - DNA, 2213 bp, Artificial Sequence
  Description of Artificial Sequence: Synthetic polynucleotide
ygaaggygaygggtttaggatttgtagaaatygttgyggtttggggyggtyggggatttayggttttttggggyggttttgaataggttttggggygtagygttygttttttaaagaagtttgggatygggttttgtttygttgtaagttaygtttttygtgagtttataagtgtaaaattagaaaagaatgtttygtttaaataattaaagagyggtggttttygygggggtagyggaggyggttagtagggttttygttttyggggagaagtgtttaygatttaagggttgtttgttttaggaattttttaaagaattatagatattgagagtattyggggtttggtaggaagtgtagtgtattttttagttttagggtaattaggatagtatgaattttttattttgtggtagaataaayggttagygtttygatgtggygygttygatttttttttatagagtttaaaagttaygtttaattaaattgtagygttttygttttagttgggtatyggtttggaagyggtttggaattagattggattygaggaggtaagatttyggtagygygaggttaattataggttttattygyggtttttagttyggttttatygtagtyggyggtagatattttaaattttttataygtygtttttagygaggygtttyggggaaagtagygtgaggtagtgagtygaggggyggggttaggaggaygtttygttttygagttygtttygtyggagggtttgattaatgattttttaagtygttttagttttyggygtagttttttyggtgggttaggtttttygttygatttgttttagtyggtyggagtatataygtttggtygyggggygttygtataaaagttatagttagyggaggttggaaatagtygtygatttgggtatyggtyggaygaggatggagtgattagygyggttttggttatataggttttgttttaygtttttygttygtttttaygayggagyggagttttatttagtygttttaggaaaggtgaggggttygttagaygygtattgygtagttttygggttyggaayggtggygggtgtygtatttygaggtgaggttaagggtttttygtttttygggtagaaattttttttggygtgaaaggtygagggyggttggtgagtygtggtttttygyggygtyggygagaaggagtygygttatttttygtgygtgtygggttggataaagttatttaagygygaaygagtgttgattttgagttgtgttttygagattttttttttygggtagagtagattttttgtttaatttgtttttgaaaagtaaagtyggtattgygtttttttttatttttttaggaagtttaagaatttyggagtttygtaattttttttagaygttyggaagtaaatygygttttaggtaaaaygagttygtttgagagygtttttagtttygttgggttgttggtgggygtayggggagaattagggggttgygtttttygggttaagttygatygtttttyggttttatygtattttyggttttttgtagygygygyggygygggaagttgttatggatygyggtygtttagygggtagtttttttagygttagygtygagttygygtttttggtygtygttattygygattygygtttygggyggatygggtyggggtyggygggttttgggggyggttygygtttygggagygggyggtyggyggyggygaatgyggygygggagygtagtygggtgtagattttgyggtaygtttttttggagttgtagygtaygttgtygttygtgtygttygatattaagttgtttaagttggaygtgttgttgttggttattatttatatygygtattttattygtagtttgtaggaygaygtygaggygtyggyggaygtygggttgggygttttgygyggygatggttatttgtattyggttaaggtaagygggyggggygtatygyggggttggggtygagattaggatattttgatttgttttgttagttatygttttgggtagatgttttaattttttttygggtgaggygggaagtygatygggagaaygatttyggttygygagggtattggtggtaaggttttygtygygaaagtyggttttttygyggtttataggtggttggagaggygtttaaagtygg

SEQ ID NO: 745 - DNA, 1247 bp, Artificial Sequence
  Description of Artificial Sequence: Synthetic polynucleotide
yggggggtaggtygygagagggagaggatttygggagtagaygaagaagtggagtagttaaagtttgygttagaagaggttggggattgygagaggagaggttggggtttgtaggggagygtagtagtttttagtatygatttaaattttaaagattygtggtttttgtttgatttygagggtygggaatagaygtttgtttttgtggagagygatatttaatygagaaaatggggttgtttygagttgggttttgygtttggtttagggygaggtttttttggtttygggttggtttttgaggggygtaaayggtaggtttggyggttggggtygaggagggagggtattatygtttygaggtagtaygtagtttgtagtagaggygtttgttttaagttgttttttgggggygtygtygtygtttttttttttyggggtygttygtttttaggaaagtggaggyggttggygaggatygagagtyggggtygygttgyggagggattatattttygggagttygagggggattttggygyggygggttagtttttgtttttyggttaygggtyggtagygttygttttttttyggttagygtttgyggttygygtygygygtatygttyggtaatttygygygygtttygygggggygttgygtttttttgttatatyggygtatygyggttttttttttttatattttyggttygtattattyggttttttttttattttttttattttttttttgttttttttttttattttttttttttyggygaggggygggagggggygtggyggggtyggggtttgtgtggttgggattyggtttttygtatttygagttygttygaggagtygggtttyggtygttgtttagtygtttygtgtttygygygttttgygtygtygttatygttttttggggagaygtagttatttgttygttatggatatttttagggttttgttttyggtygttttttttattagttttttgtgggatttgttyggtttttagtaggtttttattttatttttttygtygttygtygagttgggttttattaagggtatgygaagtygtaaggaaggtaagatgtagygggygtygygygatagtgaygygggtygggagggttaggaattatagtygyggttttaggaygaatttygggtttagtagtttygggygtaggagtygttaggtaggggttygygygtggtgttttayga

SEQ ID NO: 746 - DNA, 1861 bp, Artificial Sequence
  Description of Artificial Sequence: Synthetic polynucleotide
ygtttattgggygaygtggggaaataagttttagttttygaagygygattaaaaggagaaattaagtttttatygttagggygggggagggaagttgggtgtyggtaggygtttygtyggagaygagatttttttyggttttagaagygtttygttagggttagagagggygagygtggygggagggaagtttttgttttttagyggttaggygattygaagtygagygtygtgttataygtatttygtttygttttgtttgyggtattttygtgtaatttttatgaaaatgttttttygtttttgaygtttygyggtgtaatttttattttttaaygaggagggggtygtygtaggattgggaatttagtggtyggygttttagtattttyggaygygtttygtgttttttttagtatttttttgagggatygtttattgygattttaygtagtgtyggttatttygttttagtygtagggagtattaaataaaagaatttttgtaaatttttttttttggatattygygggttttttaaatttggtttttatttttttagaatttgtatgtagttaaataggaaagttggygygggggggatggtgtgyggaggaagggatttygaagtttttaggttatttttggtttygaggagygygyggagtggagtygttttttygygggttygatttaggttttttttttttgttattttttttttttygttttttttagattaygtagtaagattygtygagggygaagaagttgggagtgattttaggggtttttgyggttagattaaatygtaattttyggtgtttttattttygyggatygyggggtaaygttagygagtagygtttttttgaggaagggaagagggggaaagggtgatyggaygagygtatttgttttagyggattttyggtgtatatttggggattgggggttttttaggtggygtttttttattttttgygggtttttttygtagttttaaatattttaaayggygygygtatttttygtttggtttatttatygatttygtygataygtaggttattaagtttaaggtgagtaggatttaygygygtygtatattttttagggatyggttgtttttagtygttgtttgtaattagggtaaaaygaagttttttgtttagygttyggygtagttygygtataygaattyggagtagagtatygtagygattgyggtttaggttyggggattygggttyggggttygggggygttygttttttttttttgygtttgttttygtygttygtagttgygtttygggaaygyggygtttttttatttgttggtttttgtattttygatayggagttggtgtttygggaaggttgttttttgaagttttttttgttttgttgtggttttgttttttygyggatttttttttygtgtygaggtttagtttttggttttaaggaataaattygttggtttgaaagggagttayggtagaagtttaggggtagagyggygggagygygygattygygyggttggagtttygggggtatttggagagtagygygtttaagyggggttattggtttygyggttgygtttttttttttttygygtygygttttttttttygggttttttttttttttttttttttttttttttttggtttttttttttttgagtttgttttttygggtttttttgggygattggggagaggaggyggtagtgtgatttttagataaattygggagaaatttttataggattataygtygattggtagtttygaggattagtgggygtygyggtttygygttgtggttgygtyggttttgtttatygg

SEQ ID NO: 747 - DNA, 3378 bp, Artificial Sequence
  Description of Artificial Sequence: Synthetic polynucleotide
ygggtygggtyggygaggggggtttyggtygagaygygaggygygttaygggattyggyggygggagyggayggygagygagygagygagygggygggygggygggygggagggaggtggyggtyggggttgtttaagatggggtyggagtygygggttaggygyggaggagayggaaggggygggtagggtygygygggygyggtgygggygttttttttyggtagttagyggtagygygtyggtttttygtttttygttattgyggtttygygtyggtygtttgggtttggagtttygyggygttttyggaggaygggtttygygttttaygatttattttyggaggyggggtygggtygatygggggyggaggaygtygtaggaggttgttyggatttygggygtttgttaggttttttttggggttttttatgttaggtttygyggttgtgttygtaagygtagatggtttygggattygggttattttgaygtygtagatttagtaygttgyggatygggtaygttggatttygggataagtgyggagggtygggggttggaagggattygagagtagagttygygtttttattttayggaygyggttatygaggttygagaggggtyggagtttgygggagagggaagggttttygagggttttataatttggttgygttttttttttagttygggattyggatgagtgttgtttgaggtygaggygaygaatygttttttattygtttttgygygggatttyggtaggaataagygttygtttttgggatyggaggyggtaaattttaggttygagttttttagygtagygtttattygyggagtygygygtttttttggygtatttttgggtttygyggttyggtttttagtygtygggtttttygggttagttttttgttttttagatygaggygtaataagtttgaaagtagygttaaggagtagttagygagtygaagggagggygtggggygtygggygtttygggattttygaaygygygtaaygttygttttyggggatygggygygggyggtaggygagygggattgattyggygggttgygtatatttttttttaaggtttygattgtgygyggaygggggygygtttaggaattttygttttttttttygtttgtttgattttgttgggtatttaaagtyggattyggyggtatttyggygtgygggygtagagtttygttgtygtttaygggagggagyggttygatttttttygttgttttttyggtagtyggggtygtagaygagtggaaggtatgagggttttaggagaygtgatagtygtttttttagattttatatatygtatattattttttttttagatagaaaagggatttagtttttttttttttygttttygttygygyggtttttgttgttttttygyggyggttttygtttygagggggygtgtgtttgtgtttgtggggagagtatygagggttttygtgggtttttaggatggagygggagagtagattttttagttttttttttaatataaaygataagyggtttttttggggygggagtgtaggttttttattygtttataygtttttttgttttttaattatttyggagttgtagtttaggaatttgygttttagattyggaggaagaayggggaggtygyggyggggaygggtgttgaaagagggttggtttagggtttttygggttttagtttaggygtttgygttttaagaaatttagaagtttaaaataaaagtggaaaggggtaaggtgtttagyggtttggggttggggtgttagattaggygttttttttaggttgtyggggagtggttaagtaggagtygtygyggttaggaggagggaygygggttyggagtygtagttttygttaagttttttyggtygtatygtttygyggtgatttttagtttygtygttttttttygaggtyggaggagttttttatttygtttagggggtygyggggatttagggagagggtttttggtygggtttagagtttttagtttttttaggagggggygggggtygtgttygtttttygaggtagtttygygyggttttaagttagygyggygayggtggagggtyggyggtttttgtttatyggygaygyggattygggagtgttyggygttygggagtgttyggygtttggagyggagayggtatagggtyggtttaaagttgagagyggtttattygygyggtttgttygatttagtggaaaggtagataaggagggaagagttaggygttygygtgggggtggggggygtaaaaatagtttttygttygaagtgggggagagtatttttagggagtttttattgttaatgttaggtttataggygagggtttttaygagygagggtttygagaaggagtttggggtttttttttgtttgtttygagttttgtgygtggggggaggaygtttygggtttttataatgtttgtagggggttttggaygtgattagtaggagggggataygttygggggtttttyggagtttgttgygtttatgtgtggttgttgggggttatggggggtttttttagattttygttagygtttgtgtgtgttgggggtatagygggaaygttttttttagtttgttttgtgtatgtgatgaagaggggtgttaggttgtggtgtgtggatggggaggaggyggyggygtygaggagttttttttgygtttagggtygttttttttttagtttgtttaatgygggttygyggggatttgttatattttatygttatygttggagaaggtagggggttgagggggtagggggtgggggtttaaatttttgagttttgagygtaaaatttyggagttgygaagttttaaayggygaagttaggaagtttgggygttygtttttttttygatttttttttattttygttgygtttttattygtygygtttttagtttttygtyggagttttttttattttttttagtagtagyggtttygtyggygaggattygattyggygagttgtaaattttygygagygtttygygtygtyggyggttgagtygggygttygatyggaggtggggggggtttttttagtygtygtygttttyggttygttttgggtttygtygggaygttttttggagagtattygtyggygtaygtaggttttttttygttttttygygtttgttggagtttttygggygttyggagggttyggatgttygygttgyggaygatgttggygygygggttygggtygggttaggaygyggygyggtygtttgtgttttyggtttttyggtttygygttygt

SEQ ID NO: 748 - DNA, 1646 bp, Artificial Sequence
  Description of Artificial Sequence: Synthetic polynucleotide
yggttgtagaagygggtgatagtgaggagyggggtgtagtygtyggggtttaygaaggttaagtttttgataaataaaatgtttataatgttgtgtygttggttattttygtatattgggatgygagtgtagtygttgygtaggatttyggagatagtggygaagtygagtatygygtttgagygtagtatgaagtagttttttaggggggttagtattttttttataattttggtgygtagttttagggtattttgtatgatgttgagttttttttttattaggttattgtaggggtttgyggttygtaaygtttttagtaatttttttygygtgtagaaggtgtttattttttggygtagygtttagtttagtaggyggtttagygggtagtatayggggaaggyggttgttattagaagtygggttaggtataygttgtgygaggygatggttagttygtgtygygaatatattgagtaggggtagatttyggygtttaggaatatygygtyggtgtataygagygtyggtagttaygggaagtggatttttttttygttgtagtttttttyggtgttttygaagttyggyggtagygaggtgtatagttagttagttagggtygygttggtttyggtttggtttaggagtagggtgtagagtagatgggtttttttgtygygaayggtttgtaygyggygygtttgtttttgttyggyggtygagtygttgtttygtagtattygtaattttatygggtttagygatagtaggtttaggygtaggtygttgaatagggtygataaggttagtagtaggagygtttygagygttygtagttaygtagggggtagtaggttttygtttgggtygtataatygygggygaaygygtagtaggaagtygtyggyggygtygtggtggtgttaygygygtttattttaggygtagagtgaaaagagtttttygttatygttygygtygtttygtttygtttygtttttgygtagttttygtattygtatttggattagggtygagtttgttaygttttygggaygtaagggttttaggatttttaygttygatgtttagtygttttgttttttgtagygttgyggtttyggggggygagtggggatygygttgggggttaygtygttatygttygggggtttttygatgaataygagtygyggagtttagtygtyggtgttattttttttygagttgagggtyggtgagggtatyggtgyggyggtggtyggyggttttggttggaaatagataygtaggaggaagttggtgttttyggyggygygtagggtgtttttttttagggataygyggtttttagtagtgttttygggtygtaggtttagtagttaggyggyggyggtygggggtygaggagatagggaaaagaagagtaggagtatagygtttyggttgtagtagtttyggagtttgatatttatygttgttgtygtygtygyggtygtygttattttgtatttagygtagttgtaygtgatattgtaggaagtygagygagagttggagggaggaggagtyggagttgggaatttagtygtaggtaggttattaygtgtaygtttattgygygygtgggttggtggygg

SEQ ID NO: 749 - DNA, 3723 bp, Artificial Sequence
  Description of Artificial Sequence: Synthetic polynucleotide
yggggggygttygggggtgttyggtttagtagtaggtaygtagggttttgyggaagaygttgyggaattyggygttgaagatagtgtagatgayggggttgagggygttgttgaygtagtttagttaggtgayggygttgattagtygygggggtayggagtaggtaggatatagygtttgygtgatgtgtattaygaagaagggygtttagtatagtaggaaggtttttgggggygtygagagtygygttagygtttttygtttagtyggtttygtatttttttttttttttttttttygttttttaggataggaatttatygattattatyggtaggatttttatggttttgygttttyggtyggtgattttggtaygtygttttttgygggtttgyggtggagtttggggtgggagygyggyggttttgayggygtyggggggagtatagttggagtygtaggggttyggggggaggtygggygyggggggygtatagtyggggtygtaggggttttgggggaggttgggygyggygggygtatagtyggggtygtagggatttyggggaaggtygggygyggggggygtatagtyggggtygtaggggttttgggggaggyggggygygggtggygtgggggaaggygggttagggtygttgggtyggyggggygygyggtygtgtagtttggygygaygtgttattttttagygttgtaggtygyggaaygtggtttagtagagtagtagtatgagygggtagggtaggaagaaggagtatayggaygagtagattaygtagtygyggttttttaggyggtatayggyggggtygyggtygygtaygtygttgaggtygtatagtaygggygtygttatygtygyggatagtagttaygtggygtygatgagtagtagttgtyggyggtttttattttgtyggttgtagygtagyggtayggttayggttaygaatttgyggggagygtygagggggygtyggatagygtataggtygyggtgagggyggygggyggggygygggggygtyggggygygggyggggagggyggygtatttgtttaygttgatggygtataggttgaagatggaggyggtgtatagtatgaygtttatggttatgagggygtygtataggygggggtttagtagttaygygttattttggatttgygyggygatattataggttttgaggttttttagttatygygggtttttgtgattygtttttatttttatgggtagttttagggttgaatayggagaagggggttyggttgtgagttagaggttagaggatygggtagggaaatattttttttttaygtagatttttttttgttttgagttagggtttygttgtgttatygyggttggagtgttgtggttttattatggtttattgtagtttggaatttttgagtttaagygatttttttattttagtttttagagtagttgggattatagtygygygttattattttyggttgatttgtttttttttttgttttttgagayggagtttygtttttgttgtttaggttggagtgtagtggtgagattttaatttattgtaattttygttttttaggtttaagygattttgtygttttagttttttygaatagttgggataatagtygtagttattattttyggttgatattttaaaattttttgtagagattaggtttggtatgttttttaggttggttttaaattatttttttgtttttgttttttaaagttttgggattataggygtgaattayggtttttggttttggttttttttttgttataaatatgagaayggtttggggaattttttgggggygggtttgatattatygggtttaaagggagtttttttttagtttggggtaggtagggttttygttgggtttagaagygaagttggttgttttgttggttaagttttttgtgggagattygggtaygttaatttatttttgtttttttatttgtaagataagggtgatgatagtatttatattataattgttttgaagataaattataattaaaaatatgaagatygtgtttagtgtttagygtaggattttaygtggagtgattttttttaagggtaaaggagtaggtagtttttttaatttttttygtygatttggggagattaggagtttaaaygtygttattgtgaygtttgyggttygaaaggagtataggttaygygtgtttygtgttgttggtttttgttttagtygtttggatttattgtgtttattaaggggaaatttygagttttttttttttatagtyggggatatygygtttttagtttagttttaagttgtttttttttggtygtagaggggttggtattaaggtygatttattygagggttagatttggtgtggagtgtgggttttattttttaatttttttttaggtttttttttagggtttttagtaggggtttggtttttatatattttttttttttttgggttttgtttagtttaggttttttttgygagttgtgagtttttttttgggggtgtgttagtatttgtattaggtgtgtgtggtgggtagtggttgtggtagtgtgtgtgtgtgtgtgttttayggtagttagggggttgagtttgtatttgtttgtttgtttagttggttgttttggaggtgaaatttagttayggaggggattgggtttgataaagtygtttgttttyggggtttttggatagaaggaygggtattttttggataatagaygttaagatagayggggaaggagaagaggaaygagggtygggggatagatagygtagygggtggaaggtygygaggtggyggyggtgggtgtatygtygagggataaggygtagygtttttgtygtygttttagttggaagtttygtattagaaaggggtygggtygygtygggtttttygtagggatagggayggggaatygaggagtaggtgaggatgttygtgyggtyggaygyggtttatttyggagtagaygaagagyggtagtattaggagagygaggaggaggtyggyggtygttaggtttaygatgaaggagttggtgggygtttgtagggygygttyggtggttaygtttaygtataygagygagtttttygygagtatygygtygatgagtagtaygttttttattagygtygtygygttttgtttagttagtttygtagatgttttygtagatgttttygyggtyggttygygtttagttagtagttygttygygttygyggtgttgyggttttttatggygygttygggygggygttgagtatygyggataaygtygggtygtaagtyggggagttttttttttygggtaygtttyggtyggattttggtttygttttygattygtttyggtttaggggggttttygyggygttttatygtgagtttagtatttgtttattttggaattttgygtagggagagaygggtaygtggaygaatgyggyggtttaaagagaygggaatgaagygaggtggtggttaygggtaggttagtatygttyggygtygygyggggttygygattygagaaatygataaggatggaggggyggttagattaggttttgaagygygygggtatygaygttagygttattttattyggttygtgygtgygtttyggttttygggygt

SEQ ID NO: 750 - DNA, 554 bp, Artificial Sequence
  Description of Artificial Sequence: Synthetic polynucleotide
ygtaygygagtagttatatataygygtatatatatatataygttttgtttttygtataaagtatygtaggtatataygygtagattgagaatagagtttttattttaagtatygygtttttttttttttgttygtttttttttatgggygtggttgagtyggtggttaatgyggaggygtygttygttttattttygtatatttattttggtttttgggtttgtataagtataaayggtttttttttatttttaaygagggttggggaattaaygagtaggattagtttattaataagtaaagagatygttaggagggatatttattttttgagggygtyggtagggggagyggggttgagtygttygtttygtatygygtygtttygtttagttygtagtttatagtttttygagtygttgtttygtaagatttttattttygtttttatttttgtygttyggtttagaagtgtggtgggattttgggggtagtagggggygaggggggygayggtgggttygggggtgttygaggtgttaygtttttggygg

SEQ ID NO: 751 - DNA, 1101 bp, Artificial Sequence
  Description of Artificial Sequence: Synthetic polynucleotide
ygttgygaggattaagggagatggaatgtagygtaaagttttaygtaaaygtgtygtgtaatatgaagttttttattttgagttggggagygggtggtaygygtggaagttgaatgttattatttttgggattaggygtagygttttttagaagygtttttggtgaygggtttttgtttttttttaggaygttttttttagaatgtttyggggttttggayggttttggagaggaygggagggaagggaaggagaygggyggaayggggaygtatttgtttttattgtatttttttygtttttttatttttagttatttgyggaggaggaagygttttyggygyggggaygygttgggtgtggagtagttggattayggggtgttttygtygttggagggygtgatttygatggayggtagttgtaggaattttttgtygggggttaagayggygggtaggtttygggttagttyggtttttaggttttgtttttgtaygttttttatgyggygtattttgaagygtyggyggygaagygtgggggtygaygaattggattagatygggttgttttygggygtattttgyggttygggtatttgtagggygggtagyggtyggttttttattatgttggtygtyggtatgggggtygtygtttttgygttttttttgagtttttygttagyggtttggttygygtttttttttggttgttttttattttyggtttygyggtatattttttaattttggggtygaaggaataagtttttttttyggagygtagygaggaagggaygygaggggaygyggygtagygygtygtygttyggagtttaatttttyggagygygygtttttygggtygttagtygtyggygaggttattygggaggggygggagtygtttgttagttattyggtagtttttttggggtttttttygygygttygtttgtttttttttygttgygttttttygtttgttggygtttttgttttagygggattyggtagttaggggttttagggggyggtgtagtaaatttttagyggtttgygtttagtagattaggttggggagtyggtttggygt

SEQ ID NO: 752 - DNA, 548 bp, Artificial Sequence
  Description of Artificial Sequence: Synthetic polynucleotide
ygggygggtatagtttygggttttgggaagaygtygttyggtagtygtagtggtygttgtattaatgggttttggggtagggaggtgyggagtttagtttgygtttttggttattttttygygtttygtygtygtttatagtttattttttttttttgtagtyggtaggyggtygtaataygggygggtygagtaygtgggygttttygttatatttttatatatatatataygygygygygtatatatatataygtatgtataygygtattygtattygygygtttgtatttygtgttgtttttttggtagatatataggygtttaygagtttttttttgttagtttgtagggyggygatttttaaaatttagtttygggttttaatttaggtaagaagttgtttttttgttaatagttttttttyggttttygttatagttatttggattttattttttygygattgttgttgttgttgttyggaygtggaagtagtaagaggygtttggttaagatatattgayggtaatggtaagygtttaygt

SEQ ID NO: 753 - DNA, 1153 bp, Artificial Sequence
  Description of Artificial Sequence: Synthetic polynucleotide
yggygtatataagttgaggattgtygaggygttttttgygaggtaaataygaagtygtttggttagtgagaagaaattygaggtggtttttggggtagatagagtaggatttgtttttgttttttgtttttttygtttttttttttttagyggyggygatygtagtaatagyggtagtggyggttgttgttattgttttgtygttgtygagtyggttatttgggtattygyggagtygygtygttgttatygtttyggyggtttttyggagtgygyggagggggyggyggaggagygagatatttatagtaatygaggatgygaggggygtttagtagtagygagtgtttgggagttaggaggaggttttygygygtyggtaatttttagtgttaggygttttgtagttttygygygtygygtttgggttygtatygttttygtagtgagggttygttygagyggtaagtttttttyggyggttaagtygatatttttttttygtttygtygtttatttygggtagtagtygyggaataatggagagygtagttagtagttttggagayggygttygggggaggaygygtygtygtygtygtygttgtygttagggtaggygygygtygygtggagtygggygggtgygagggygygyggyggggggtggggggtaygygtygygyggggggygggggtagtggggggygygygygygggttyggggagttygyggggagagttyggygttyggygtagygyggygyggttaagtttygygtttttttygttttttttyggygygttygttttygtttygtygttygtattygttgggggygtttagaaagatgtatagaggtaayggttaggggagyggaggtttaagttatatgtttgygttttygggggttagagttygttagttttygyggatttyggttygyggttagttygagyggttygggtgagtagyggtatagyggttttttygtttygyggttttygttygtygagaygtggttttaagaagtggtgtygtagtyggggtagaggyggaggaagtygagtygggtaagtygggaaggttgyggagaygttttgtyggggtaggtgttgtagttttagttagyggtttttayggagggggygg

SEQ ID NO: 754 - DNA, 1146 bp, Artificial Sequence
  Description of Artificial Sequence: Synthetic polynucleotide
ygttttagattttgygttyggttttagtggggtttttygttttttttyggtttgggttttttttttygayggtttttgtygaagggggygtttttgtttttttgttttttttttayggtgttttggaaggtttgggtggtygtagaaygtaygggggaggggtgyggygtggattttygggyggygygtttggattgyggtttyggagttgggttgggggaygagggggaygaggggggygggggttygtgggtaygttttattttattygtgttygygatttgttaggagataagaggggagagggttttttaagaggagagygtagtatttttttttttttttttaggagagtattyggttgagaataatggggaatygaagggggatagtaaggggggygtayggggtygtttygttygtttttttttggggtaggtttggagggaaggtaggggtygggggygyggtttttygagatttttygtttggggggygttttttttggttttyggagtttttttttttttyggggttttygttttgtyggggggatgtygggtgygttggggtgygtygggaagtayggggatgygyggygttgtaggygyggtttagggtttttygggggtygygtygyggagggggygaagttaggagttggatygtttttgtttttygttttgggggtaatagtttygtttttttagtttagaygttttygagtygttygygggtttttagygggagtygggggtggggtttttaagtattygygtttttatygttttttttygttttyggtttyggtttyggttygygttttagtatygtygttttttgggtttttttyggagtgggagggagtygyggtttygttttygygttygtttttttttaggtttttyggtygtygygtygagtttttygygygtggatagattgttyggtygayggayggaygtaggagtyggttggyggtygtygggatttygygggtgggaggaggtttyggtygtgtttygggagggagaggggagggggyggaggaggaggaaggggaggagatagatttyggttttgagygttatyggygttgataygygagtttyggggygttttaaattttyggttaggttttttyga

SEQ ID NO: 755 - DNA, 961 bp, Artificial Sequence
  Description of Artificial Sequence: Synthetic polynucleotide
ygtygtygttgtgagygygygaggattyggggttttaagtggtgagaattattygagggatttttyggatgtttttttttttttttgtttttgagttttgtagtatagyggtgtyggtygtyggtagggaaggttgtattttttttgygtygttaaatygtgtttattatygyggtgattgtygtttaggtygtatttttgagtygtattygygygtaggggygtaygggtaygygtatagggaggtygtatatatatatatatatttgtatagggaygagtygggggtttttgaygttygtygtttatttygtttyggtttggagttttttggtttygtaggtgtagygaygtttagttttygtgyggttagygygtygygtyggyggattttgtagtttagagagtttagggagtttagggaggggagyggggygygggyggggtagtgtygtataatygtaggygygtttygygtygttttygtttygggtttattttttttygtygygttttttttagtttatttayggaygagyggattttygattttygyggtagggatattttaagagttttgtttaggtttgygtygtttagtatttygttygtgtygggggttyggyggtttygggygagagayggaggttaygygtagggttgggygtaggggtygtygttygaggattatgggtgggttagygtttygtygggttgttagttggyggggatygtyggygtttgtgtygggtygygttygaggttgygtygttygtgtygtagyggttaatgyggtagtattygygaaygttatygyggygggtttygttggttygggttgyggygtgggggygggggatyggttttgagyggagtttygygggaggaggagyggaygggaggttgggagggattygtaatattaygtaggatyggggtttttaggtgtyggggaaggyga

SEQ ID NO: 756 - DNA, 1040 bp, Artificial Sequence
  Description of Artificial Sequence: Synthetic polynucleotide
ygtatgtagygtttatttgaggygattaaatttaatatagtgttttyggggttygggaggagaaattgaggtttagagagttttygygatgttagttaygttttgtaggtygggttttttttaggttattatagyggttggyggagggagygygygttttgttggtttggagggggygggggtygtggyggttttaaagygtttagtttaggygtygyggggtggggyggttttggyggttgyggggygtagggygtagyggttaagyggggttttyggaagtatagttggggtgtttttatttaygattggtygygygttttttttttttygygttagggaaggagyggttgyggttttygtygggyggaggtayggggggygtaygaggggyggaggggatygygtygyggaggagatggygyggtaygtgyggtgayggtattygagttttgagggttttagtttygygtttygygttttygggatagtatggagygttyggagttygagttgattyggtagagttggygggtagtgagtygtagttygttggagtayggtatygttttgtttgttaggtgagggttataygagygttyggggatgygggtggaggttgtttyggygggaaaggggttaygyggtaggatyggtttygaaggagggaaaattggtygttgtyggggygttggggygtttgttagatgtgygttagaggagyggggygyggygaygggtggtatagtttttttgtttttttttygatygtgggygtttgttgttaattagygtygtatattatttttttagyggggtttatygggtygggygggattttttttygyggatttttttatatttgggygggtggattttygtttttgygyggygtttttatttygttttgtgttttttgygttttttttaggtagygattgtaggggtgtatttygttgtyggtattagggtattggggtgtttygagagtyggggaagggagatgtgtggggygagtttttgygttygygtgtgagygg

SEQ ID NO: 757 - DNA, 1497 bp, Artificial Sequence
  Description of Artificial Sequence: Synthetic polynucleotide
ygatatygtgggtatttttagygttttygataggaatttttggtggtgttygaatayggtttttygygttgtttttaggggyggattgttttttttttaggatttttttttgagtyggtgggttatgtttttttttygtttgtygggtatatttttgtgtatagttygtgyggtttggtttggttttgygttttaygttgtyggtttatttttttttttaaatgtagttttataagygaggygggatyggygttagtgtttagttygggatagttyggggtaggyggttatttattagtaggttttggygyggaggtatgyggggtgggttgagygyggggtttttgygyggaggtttatttaygattttagaaggggttttyggygttgttgtygttggaaggtattttgtgttgggttttggttggttyggggttggtttttgyggttgttygggttgttggaggagggagaggtggyggtttggtyggygygtatttgttgtttttatttttagyggattygygttggggtggtygtyggyggtagyggtttttygggtttatttttaggtttaattagaaattygggagtagttgagagagtttyggagtttygtgtattgtgygttgttttgatttgttaaaaaagaaagtagaaaaatatttaaagtaygttygagaagagaagggggaaatttggggtttgttttttttttagaaaagtygaggtttagggtgagagtttttttgagyggtttttggttgagttagyggagyggggaggttttyggygtttttgygatgagattttatttttaygtyggttgygtttygggattttygygaggattygttyggygggygygygagygagyggggttttttygggttttaagyggtttyggggtyggygtttygtgattttgtyggatttttttttttygygyggtagygaagygtattatygaggttggggtygggtttatygtggggttagagttygtttttagtaggatttyggygaagattagttttygtaygttagttygtygggtggaagttyggggtattaggataggttyggaggyggtygyggggttyggtattgtttgygaggaagtygtttttgttyggttaygtygtttttttygtagyggtgttttyggggttgygattataaatttyggygttttyggggtgatgtttgtttygttattagggttttygygygtatagttttttttttgygttygttgttgtyggtagtygtggaggtttaggtatttggygtggtygtggtygtggggaaatttttygygtgygttyggtgtttttattttgttgtgygtttttygttttttatgttaggyggggtyggaggtyggggttyggagggtggagagatttttggggataaygaggttttagagtataaaygtttagtattgygggtgatatttygggttttagttygggagttygygggtggagtygt

SEQ ID NO: 758 - DNA, 1845 bp, Artificial Sequence
  Description of Artificial Sequence: Synthetic polynucleotide
yggtygggtgaggtggatataygttgaatttygaagaygggaaaatttagagtttggagttttatttggttagagtygagttagttttatttattggaggygttatagtttggttgaaggygttggygyggygyggttttttggattagggttgyggygggagygtaygatttygttgtattagtgggttgggggtgtygtaataggaaggttttagtatttaaatttygtaggtygtaygtgtttaatatttagygygttatyggatttagaagggattaaaggataaagttttygttattygtttagtagatgtttttaggyggattygagggttttaataggggtggygagtaggaggtyggggaagatatygtgttattttttaggtygygagggygayggggttgatagtataaggaattyggaataaaaagtttgtgtaggtygattttgtttttattatttatgtttgtgtattgaattttatttataatttgggagttttagaagtttgtygtgtygtttygggtaygtttyggagggtttgggtygygggtttttttttttggygaatttygggggttttggayggaygttttygagttttagtttygtygttygygttttgagtagtygtttgygtttttttttagatgygygtttgattttttaattaatttttttgttttttgyggtttttattygagtttttagttttttygtttttttyggttttygtttgggtttagttttygttygattttttygtygaaggtattygagtgagtgattttygggagtygaggtygaggtyggygggttygyggygygggtyggagttgtatggaaatggttagaggagtyggygggygyggyggygatttattttgggagtgatagtttttttgagygttyggygaatggtattttttgtttgtgaaagtttttttttttatttttgtttagattagttygggggatgaatgtatttattatttagttygttgattattttgaaaygttaaattaattattaagtattgaattaggygtyggggtyggggtatygggaggtgtgaaaatagygagyggttggagatggggaaagygaggggtgtagygtygagggggtygggyggggtggttyggggygygggygyggtagggtyggggttggtttggtyggtygtygagygygatttgtyggygtgatygtgygygatygyggggttagygggttataaaggattygggygggtaggaaggygyggagtyggggtygyggttyggagtaggttggggttygtygggatygyggttagagygygttaagtgygtaggaygyggggttggggttttggygtgygtttttygtygygtattagtgtttatttttttaygtatygttygggatggtygtttttagayggtttyggttygyggttattttygttattttygygtaggttttaygtygttttagttgtttttygaggtttttaagaaaatttgggygtygtttttygatygtagttttagttagagtttttygagygyggggtagtygygggtygtttttattyggtygygattygggattygygggtggtatttattttttygaggygtyggyggtagygggaggygagtttttygyggttttygttygagtgygyggggtayggaggagygygygtttttaagattttttttygagatttygttaggtggtgttaygtyggttyggttttygyggtttttygtttygyggttattyggtttttttgtttatygygggtagaatattagtttttygttygtattttgygtttygtygttygg

SEQ ID NO: 759 - DNA, 408 bp, Artificial Sequence
  Description of Artificial Sequence: Synthetic polynucleotide
ygaagyggggagaattyggttgggttgayggagaygttatatygygttaggggagtaggagttttttyggagygggaggyggggygtygtgtggttgygagygygttttttggatgtttyggtyggygygggggtgggtgggygttttygttttatttttggtttygggyggttagtygyggtgtgttyggagggttttgygagggttgtgggtggygggygagttttagyggygtagtagaggaggggttttygagygagygtattagggagaagggggttygtgtaaattttaggttgaygatygygtaygygtttttygggttattagttttgtygtttttggtggggtatatygaggagatygtygtggggaatyggggatyggattgtttgatagtygagygt

SEQ ID NO: 760 - DNA, 3276 bp, Artificial Sequence
  Description of Artificial Sequence: Synthetic polynucleotide
ygyggtatggtggttttygygtgtgtgtgtagygtttgtaggtgtttygtttagygttttttgtataatagttgtaggttggattygagggtttttttttttggggttttatagtgtttagaggtttygttagttttagatatygttttaggtttttttttttttttgaygtygtttattttttttttttgyggaagggggataygtttttttgtgtygaggtgttaggtygttgagatttgttgttttggaggaaaagttaggtagggtttttggttttgggyggttaggaaggttttayggttgttggggatagagaygyggggttaggttaagggttttygtttygtttaaatagtttgttttgggtagggtagggtttttttttygygttygygygttttyggttgggtayggttyggttttaggtttgaygggygyggtttttttattggaygygtgygggagggyggygaggttaaagygttggggttaggagggtattygtttagyggttttttaygggagttggggtagaagaygtygygatttygygygggtaatttttttygaggygygttttagttygtggygttgtyggygtagatttygygtggggatyggygaggttaattttttttgyggttyggggtyggtagagtaygtaaggggtygygggtygygtgggtttgggygygtygtggtgggtaagyggggttagyggagygggaattygtatatttttygagyggagtygaggataggttygtgygggtygyggggtttttttggygttaggaagyggyggtygaaggagataaygagaaygtagtttyggtttagggaggtttaaaagttgagatgttgaaygtagayggygggygttygggggttggggggygggtagaggtygttattttttaaaaaggtttttatygagtyggtttttgttttygttygaggggyggaygttygatttyggtattygggattgttygtgggtttttgttggttggggatttttagttttyggttgygygtagggaaaggttgtagaaygtagagattagagaagtygggggyggyggggaggggtyggggggttayggttgtagttyggtttygtagtttyggagttttagtttttttttttgtattaygggagygtggayggagggattttygaggttttgatygttttgatagtttyggggyggggyggggyggggyggttgygttagttttggttttgagtttttagttyggygtyggaattyggatygygatttygggagtygagtttygyggtttagatgaaggygygagtgygygggtgtygggtggggtgtttgagygagagyggagttttttaggtggaygtttttagttattttygggattttttttgttggtttttgggtttgagaagtgggygyggttggatagaygggaaatagttttttaygtataggtggatattyggggatatygggygygygyggygtttggtaaggggaagttgttggagaygygggyggttgttttygyggggttttttttygaagygtygttgygaaygtttagtttyggygaygtygtttgttygygatygggtyggygtygyggataggaaaggttygattagttaggtttgttttygagaagtttttagygtttygttygtayggggtggggattgatagtttttyggggayggggtygggtttatagagttygggagttgggggaggggaggygtygggggtttygattygtgggaagtttttgtatttaggttgttyggyggttttttaatagtatayggatatttaagaaaygyggggyggttyggtgattttygttttggatttagtggygtygygaggttttatttygagtygttgattatygggtattygggtgttgaygatttgggtttttgggtatttagttyggttttaaaygatttyggtttaagggtgtttagtgtagttaggagggtygaatygaattttatttttyggaygyggtggtttttygttygtttggagtttygtyggaggttyggggatattaygtaggtggtttattttygagttyggggtyggagttygatttttttttttttgagttttyggagttttyggggtagtagygtyggtttaggygggggygggggaggagggggtygyggtagtttttagaagggygggggggaygygagyggaggtagtttyggtggygygttygtgagattttygtygygtygygggttygggtygyggataattaaagygggatttttttttygttgaygtyggyggttygaggtttttttygyggyggtataaaaggygygggtttygtagygtaggyggtagtgggggtttgatagygyggyggtgtggatygygyggtygaagagygyggygtttagagygygggtygttygyggagttatagttygagtygggttttagtyggagtygagttttagtygagtygagtygggttyggagygttyggtgttygtagttatgtyggtyggtygygtygygygtatttgtgygttgttygttttttgttttttgggygtyggggtttaggatttygggtygaygygttttatttgtatttyggtgttygtggaygtygatatgtgygtygygttygtggtygtyggyggygtygaggagtttyggagtagygtgttgtagtttygygagayggtgttgtagtagaaggagattattttgagttagaaggagattattygygagttgatygttaagttgggtygttgygagagttagagtaygttggatttyggagtyggygaggttygggygggyggyggtygtaagtagttyggttygggtaagaatattatgggygatttgtttyggatatyggtygtygagaygtttagttaattygggtaaattttgtaatygtttaaaattygtttggagaatttygaggttygygygygttttyggtttyggtttttttttyggttygttygtttttttgtttttttttatttygttttttattyggttaggtatttttygttttygttttagtygygygggtgttyggtyggtgttttttygygtttgygaggtttygyggyggttattygttttagttttttgttaggtygttttygtagtygtttagaggggatygygtygygggttttttagtayggttttygygtttygtttaayggtgtggtttttttygtttttgtatttygtagtagtatagtyg

SEQ ID NO: 761 - DNA, 1160 bp, Artificial Sequence
  Description of Artificial Sequence: Synthetic polynucleotide
ygtaggattygtttttygatggaygtgagttttatyggttygttggtgagattttttayggagygygattattttagattttttttaatygtttygtttattattaagtatttgagttgtyggagttgggggttgatgtyggatagttttygggggttgaygttyggtgatttttttatgttattgyggtygtaggygttaygggtaggtgggtgggtagggggagtatggatagagaggaggggattygtgaggagtagattttagggygagagtaagagygyggtyggggtttttygggggygagygtygyggtagagttygygttttttttttttygtygttatttatttattttttygggtagttgtttttagtgttttattttgggygtttyggggtagtgygggttggggygagtggygagggaaagaatgattgaaatttttygagtagttttatygygygygtygttttttttygagttttagattgtttagtgttttagttgtaaagggttatttyggygtttyggtttttygttygtyggttygtttatttaygttyggggygttatttatayggtaatgtttttgtttttgggtgygtygttgggaaattttygaatttttataggtaaagatagagtgggatyggtagtttttagatttgaggyggaggggtygygggtyggagttttttgtagtygttagtttgggaagattggagtgygttgtttatygagggtttgygtygygtyggtygtttygggtygttttgtgygygttygygyggtttgtattygagygttttygyggygtgyggtaygatgtaggygyggyggtttagttyggtgattttaggtyggttygygygttygtygtaaygattyggtagtygaggtagygtygygttttaygttygttatygtygtygtygttttagtatatygtaggygtgagtttygtygygatygggagagtttttttagttgtgygttttygaggtatttggtygggyggggaggygtygggtyggggygtataggggttaggygggggygttgttgtttatttttygtttttygggygtgygtttygtttyggagttygtatttygygttygygtttygtttggaagttttggggtatyggaygygt

SEQ ID NO: 762 - DNA, 1134 bp, Artificial Sequence
  Description of Artificial Sequence: Synthetic polynucleotide
ygaggagggyggggygttyggtttttagtygygyggttatygtttgtttagtttggttggatttgagttyggttygtygatygttggtygaggygtagttgaagtagttttttagtygyggygtttttattttttaattttayggtttttgyggygygggygygatgtagttggttyggggtgaaggtaaggygyggggygyggggygyggggtattgggagygaggtattggygygggatgttyggygtaaggtgtagggygygggtygtttttttttygygtttttttatttygttaaagtttttttaygatggtttttatttyggttgggttagtttygtaattttygtttgttttttgttttttttttttttttygagtygyggggttttyggggygygyggattttygttaggggtygtgtaggygyggagttttagtyggtttgttttgggttygaagaaagttgtggtttggagttagttttttttttaygatttttgggggygtttttttttttttttgagttygygatgggaaggygtttttattttattttyggggtttttgagattttttggygaggtggggyggygyggtaggtgtagggttggggagggtttgatagttttggagagtgttygattttagttygtygtygttttttaggyggattttttagaggtaggttttagttttyggygyggggaggyggygygttttagaggggygtagggtgygygggggtygttggtttttygggtattttttttttgyggttttttygttttttttyggagttggtgtttgaggtygttgggattttagtttggygttttttttygtttygagygaggtaggtgtygtgggyggtttyggttatttttgtatttygagygtttattttgtatttagttttaagtyggagagttttggggatagtygagagtgttagtggttttatagggagattgagggttttgttttatttygggygtygtgtgggtttgggttgtttatagtatttttgygttttagtgataggagaagttaagygygaggttttttaatagttgygtgtattttattttttaggtatttggaatttyggygtttagaaygtgtttttygg

SEQ ID NO: 763 - DNA, 10783 bp, Artificial Sequence
  Description of Artificial Sequence: Synthetic polynucleotide
ygagtygggataaaggtttttaaygggagygggatatttgtttatatttygtttattgttygtagtttagtaatyggtttgtatttgtgtttgttygggttygattatttaggaygygtygaygaggggtttgttttaatttgggttattgttatttaygttatatattgggggygaggtagttagggttgtagaaagtygtygagyggttyggggagaggtgtttttatttagygttggtaattygggggtagttggggygyggyggygttygttgtagttgygygygaggaggattyggtgttygygygtttagtttggttygygyggaggagtttaggttgtgggaagattagatttggatttygtaggggtggttttttgtgttttttttygtttttagataaagtttttttttgatatttttttggggygaaygagtattaggtagttaatttatatttttgtattttttttttaaaaaagttttaattagaagaaggggtggtaaatgyggygtggttttttttaattttagygtygaggaggaagtgtaagtttygggaaagtttagtttttagagtygagagtggttggaaattttatattaatttgatttaatttggaaaygtggagygygtatttygaaygtatttaaggygtttaaaaagagattatattaaagaattygygtgggagaagaaaattggggagaaaaygaggtatygtygggttatttagygatttttttttttygtagttttttgggtttttatttaggttggagatataatttttatttttattttygtaatttygtttygtygttttttygttgttttatttttagttagaggttggagagggagggggtyggagagggagggataatagagggtaggaaagagtagggtygtttgtttttttttttattyggggaaagaggttygtagagtttagaggtagtagggttagggttygattttagaygaagttggagttttttatttttatttygtttttttygggatygttygtaaagtagaaagtgaattgygygttttttttggtygtagagaggtggaggyggggggttgggggtgggaggtggggggaggyggagtgaaggaaataaatgagtttttagtaaataaagggyggttggaagggggygggtygtttggtggtggttttggtyggttyggagyggagtttttttttgggttttgggttttttygyggttaattggaattaattatttgttttgttatttttagtatttatttttaagttttaattaaaatattgatttaggaggtttatagaagttgggtttttgttatttgaatyggattttgtttaggtaattattaaygatggaaaggagagattttygtagttyggttttygtttttttttttttttttaaaggygttataaatygttaatttttyggtttgtygggggtgggygygygggggyggggaggtaggaatyggtgaatgttaaagaggattttttttttttttttggtttttgttttgtttttttttttttttttttttatttttattttttttaagatgtaatttgttaaaayggtttttttaagtgtgtggattygygagygaygyggtggttttttgtatgtaaatattgggtttaaaaaaaaaaaggttygtttygtttttgtaattaattgataygttatattttttattttgttttagagggtygttggttgggagygyggagttttttaaaatttataattttatatttgtaaatattgtttttatttatttgatttttaagattygtttataygtggttaatttttgygtttttaatgtttttttttttttttttttatttttttttygttttttttttygtttttttttttttttttttttttttttttttttttttttttttttttttttttttygtttttttaggttygtgagtggagtttagttttatatggattgatygttygggtaatggtttatttttttttygttattagtygttatygygygtygagyggtygtyggagttygagttgaygtygttttggtattttttttggagttagaaattaaggtyggggttygyggygttyggygygtaggtygttyggttttttgygtttattttygygtgtttttaaagaagatagagagaggtattgggttgggttttattttttttttttttatttttagtttttttttttttttaaaaataataattattttaataattaaagttaatttttttttttttttttttagtttttttttttaatttttttttttttygttygtyggggtaggggagygttaygaattgattaagtgaagttataattttgygatataaattttggggtttygaattatgtygttgattaatataaagayggggttttyggttaaggatattttagatttgtyggatattaaygatgaggagggttttgtggtygaaggttyggaggaagagaaygaggggttygagttagttaagagggtygggtygttggggtagggygttttggaygyggtgtagagtttgtttttgaagaattttttttaygatagtagygataattygtataygygttggttggttagtatygagggtttttagtattttygtaagtagtaaaatttggttgtygaggtygtggttttttttatttttgtagtygtagttygggttggaygttgggagtgaaaggggaaggggttatgtaagttyggatttttttattyggattygtagaaagatttttaatatttgtataggatgttttttgtttttttttttaagtttttttagtttygggaaagaatttggtttttaaaattttttttaatgygagaagttaaggagaaagagggagaagggttatattttttaggggttggtatatgatgttaattyggatygatggttttagtygtagttttyggatttyggtygttgggagggattggtttggygttttggaggtagttagygagtttygttygggtaygggtggagggtggggaggtttygggtggttygggtataaatagtttattttgttttttgygygattatagaggaygttttgtgtagtgtagggggtgtttagaaggttygaaagtagaaaygaaagtttttaaaaatttgttttaaatggtygagtygattaatgttgggattgtggggtattttttttaaaaatttgtttaygtttygtyggagaggaaatygtttaagggygtyggagtttttaattygygatgatttttagtgttatttttttttttaaatttttatttatattatgtgagttttttgaaaggygagtttttagtttttatttttayggatttttttttttattttgggaggtttygaygttttygttaggygtagaggaaggtaggggttatggtaaaggtagyggggttgggttgttaggygyggaggtttagggtygtayggaggatttagggtgtttygagtttggtgtaggttgygygyggtttttagaygtttgaygygtttttttttttttttttttttagtgtayggtttggttgtyggggygtttttttaggatttaagttttaagttttyggagttttyggtygaygagttatyggataatgataaggagatttygggyggygggggggaygtyggtaagaagygaaagyggygagtgtttttttttaaggygtagatttaygagttggagyggygttttyggtagtagyggtatttgtyggygttygagygygaatatttggttagttttattygttttaygtttaygtaggttaagatttggttttagaattatygttataagatgaagygygttygggtygagaaaggtatggaggtgaygtttttgttttygtygygtygggtggtygtgttygttttggttagggayggtaaattatgttaygygtttaaagtttaggatttggtagtygttattttttaggygggtatttttttttttgtttatagygygtagtygttgtagtatatgtagtataaygtttagtatagttyggttagtattttttagtattygatagtatattttttggtttaggtttagtagtggatttggtgagygtygttttaaygagattygyggttttaggtttaggttttatttyggyggyggtggyggygaggaggtttyggtttttatggtggttattattattattataattattattatggagtygagttgattttyggttttattagggaggygtygggaggttgtttgygtttttttggagtggtagattttatttatttagttttgtttatgtttttttttttgaattttgggagagggttgaattttaygtygtgtttatagaatgtttgygtagtttygtttttttgttttttttyggggggattaaatygttttagygttaatgtygttatttgaaaaygagaaaaagatygattttttatttttgttttygtgtattttgtaaaatatgtttgtgtgagtagygatattgttagtygttttttaaagtaagtggagaatattttaaaaatatagagaatttttttttttttttaaaaaaaaataagaaaatgttaaatatttatggttatgtaaaygttttgataattggtggtagatttygtttttygttgtaaatatyggtggtgattgttgttaaaatgatttttaggatyggtttgtttttygtttgggtttaatttttttttttgtggtttgtttgggtttgttttttgttttgtttttgtttttgygtttttttttgttttttttttttttttttttattttattgtgtaaatattttttaaatatggaaaagaaaattttgtaggtagggagttttttgttttgtttttygggtttttagtttygaatttggagtttagttattyggygyggttttttaatagygtygggygtagaaagttttygattttttaaataagaattttaataaaaattttgtgtttaaaaaagaaaaaaagaaaaaatttttgttttttygtttgttttattgygtygggtyggaggtttgggtttgggagtygggttyggtygttygyggggtttttataggyggtttttttygggyggggaggtygggggtatyggggttttggggygggyggggttttyggtgtaggttttttygattataggttgtatttygygtttaggattggggyggggaggagaaygttyggttttyggtttgygagyggtyggtyggaagtttagggtygtttattttttttygtattttttttggtttygygygttgtttgaatttygggyggtagygttyggttaygggaggaaaagtgatttygggagtygtaaaggygaggagagtaaatttttttygttggtttaaatttatgagtggtttttttagtttgagaagttgttgaagttattatattygatgatttttattttgttatatttgatttattttaygttaagaaagtgggtgggtgggggtttgaggttaagattggttgttttttttttattttttatttttttttaaaatttgygggttggtgttgatttaggagatygttaaggttgggggtgggaayggttagggygygygaggttttggtttagggggtttgggggaagtaygyggggttttgggttygggggagggaggggatattgtagttttttttaggatttttggttttaggaagttagggagygagaatttttggtaattttagtaaattatgtttttttttttttttaygtttttatttttttygggtttttaggttttttttyggggattggatttygggtttttttttttttagygttyggyggttygaattagggtgtgyggtttttttaggttagtttttgagygtggaattgggtggattgttaggaagtagaggtttgggggtggggtgagtttttyggatgggaagtgggtatatagtttygggtaygttygggaagggygtatttattttttyggyggggaayggatttygttttatttttgttgttggaggaagatttttttggtagatgttggygtatatttggttaygygggggagygttttaggaagtttggttaattggaggatgagttttttttttttatttygygggtttttaaaaatatttgggattttagtttagagtttagygggtgttgtagaygttgagggattgaaygtyggygtatttggaaattgtatttttgtttttttygaagttgtattattaaggttggggggttgggtggtagtgaggaggtygggtaaaaggagyggttttagttgattttttygttttttgtagttgatgattaggtttaatttaatatttaaagtaaatatgattattygtgygattaaatttgtgygtygatagtattttgygtagtagtttagggaygygatgatattttattttygygttttatatygtttttggataattgagggttyggaagtttttttaatattttagtaaaggtttttttttattttygggtttattttyggggaaagggtagtttttttaaatgttaaaaggtttttttttgttttttatattagtttggtaatgtttgggggtttatgttttattgtttttaaaggttaaygaattttttttaaatagtttgttgtgtaataattgaaygtttaatttgttttggtattaattatttaatatttatttgtaattttttttaattttaaaatttttttgggaggaaaggtgagggttttaagttttttggagyggagttgttagaaggtttgaggttattttgatttttttaggttttagggtttttagggtgagaatgattataagagatttttaggtttttagagaggaagggggaagygtggaaggtttttattttggtaggtttttattatttgtttattgaggataaatttggagttgtggttaggatygygggtttgtaatttgggtgtgygtttttgtggtyggtygggagttygggaggtggattyggygttygtttttttttgttttygggtttttatggagttaataaaagygtttgyggagttttgtgtggttttaattttagygttttgggagygtattyggygyggggttygttttagtagtttattttygtttaatttatagygggyggtataaaatygtataatgggaaagttgggagtyggagatgttagaggygtgtatattaaaaagggatagagaaaggatygyggggatagagagaggggaagaaggagaaggggttygttttttatttttygttttatttygtattatttagygygtttatygtyggtagtgaatttyggagttaggtagaagtttttttggggttttgttgggtttgttattgggtttttttgttatttaygggttttatgttggattttatatggttagttgggtygagggagygygaggagggattygtataaaatttaaattgtgttyggtttttaaattttgtattgttgtttgtgaaaggaagaygtattaaaaattygtgttatatttattggggaggaggttggaggaggggagaaaaagttatttttgtttttgatggtttyggagggygtttgtttygtttaggtttygtgatattgaaagttggattttttttattttgttttttttttttaaaatttttttttttttttttttttataatttygtttttataatttttttttttatttttataattttttttttttataattttttttttttttttatttttttttttttttttttttgtttttttgattttaaygttgggatgggagttygygaatttgygtttttagggtttggtttatttgtgygtattttgtttattgttgtgtgtgtattaggaaattaatttttgtttgggagttttgtattatyggatygttttggggtttaggaggtaatttagggtatttagggtttgggtgatgttyggttttttaygggtttagyggtttttgggtagatgaaaatttattttttgatttygtaatygatyggtttygaagygttygygygyggagtygtttttttatttatygygagaaaggttttgagaggttaagggtgtygtttagtttygggtttagttagatttgggttgtagtyggttttaaggygatttgygttyggtyggattatttggttattaatttygaagagttaaagaygygygygtttttttgaattatgygyggggatttattttattggttttttggtgygatgggaaattattttagaaattttttttaatagygtttttttttatgttggaggagggagatattttttttttaatttttaatgttttttgtatygygtgtttataaaatttagtattagggagatatagtagggtttttaaggaatttgtttattttttgttttttttaagyggtttaaattggygygaggtagtyggaaataatttgggttatgtttttttttttgtaattgttaggttaaaatttttataagtagtttttaaataaattatatgtattaaataaaaatagtttatgttgagttttgtggaaataaaaattggaatttagatatgttttttataaagttattyggtttttaatgagtagaattgagttggtggaaatttygattaatgggaaatttggatgygtttttttttttatttagtataayggttatatttagtagaattagataatttggtaagagtggaagtttttttttttaatattttttattttagatggggaaataatttatttttttatttattgattgttgggtttagttgagatttggtgtgtatttttygagtttttttaagagtttggttattgaaaagttaatttaatatttatygagtataaggatagtttttagaygtatttattaaggtttatygttaagtgattatttggattgaagataaaggttaggggagggggygtttaggtatattagattttttttatttgggttttttttatttagaattaggaaatygggagygygtttgtgygttgttgaagtttttttttyggtgttaagtggygggyggattagatattgtgttgggyggtattttaggaaatatgtatttgtggttttttgagaggttaagygtagtgatattttaaatygtgtygatatattattttttatttaggatttgtaaataaatttttgattttttyggygtattatagtygtygttatttygttaaggaagygatttgagttttattgtttttattaaygtttygagatatatatatatatatatatatatatatatatatatatttttttttygtattttgatttttaaaggttttattttttttttttygaggtatygttattaataaagaggygaataggttttagygtygttattygagtaagyggggaaatgtgggttagtagtttaggttygygygyggatttygygtaygttttaygygttttttygggtyggagaatygagygtgtgtygygtgttgtygtygttaggaggygttygagtttagygttttygagygtttttgygygygggttygggtagagttygggagtygtyggaggtagttgygtattagyggattygyggttygggtyggagttyggtgagtggtgttaagaggtggyggygagtyggaattttggggagagtygygagttagayggyggygggtgtttgggaggtgygagtygatttgtgttyggttgtggttttttygttatgtttttttttttttaygtgygtattatygttygttttagtttyggtttttatygtgtttgggtatagattatagtygattggtttaggagygttttggttattgggagggttttattaggygttagggygygttgttttygygattttagggtttttggyggygtyggtygygygggtggaygyggagagggyggtgttgygagggttyggagagtgggtgttygygtggggaggyggttygggagygygggagygatgyggaggagggattyggtttggttgtaggttttyggggygggggtttygggaaggagagattttygtttttygttygttttggattygggtttygtyggattttyggtttttgtygttygtygtttggaagyggggtaggygtatagtttagaygttagggagagaygtttygtygatttagatygtggggttagggttygggaggtaagaaygttttatatatagtagggtattttaggtaatttttatttygtgttgaggtttyggttagggtgtaaaggtgttygggaatggaagggataygagggtgtggaygtttygtattttatttaygtttggtgttttttgagaggttgggygtggggtagagggtaggggataagggggtgatattttttaaggttttttttttaataaaagtagggtttgtagttttagtttgattygttgattgttgggtggaatygttttatattaaaggtatygtggttttaaatattgttttttttatttttttaagttttygttttaaaattagttgtyggtgggtyggtgagggygtttgtagtatttaggtttttygyggggyggygyggttggataagaaaaggtttttyggttggggygygtagygtagtttagatatttgygggattygagatgttttygyga

SEQ ID NO: 764 - DNA, 2194 bp, Artificial Sequence
  Description of Artificial Sequence: Synthetic polynucleotide
ygggttatattatygttaaatatagagtaygtaatttaattaaaaattygattttagtttttttttgttygygttagaayggatattagattgtttttygttygttttttagtagtttttttttatttyggttgttgttaggatttygygatttagatttttttttgaagattattttygattttygaygyggtagtttttgaggtygtagtttagtayggagaagttggtyggttttgggggttatgaggttgtttattttataggygtaggtttaygtagtatatatattatttttttttttggatttagattaaataygttgggttgtaggagggagayggatagatatayggattygygygygtaygttttattaattgattttaattagaaaayggagttattgtgtaaygtttagttttttttttttygatatttttaattagttaagttttyggtyggtgtttgttgtattaaatattaggaygtggttagggaaggygtaggtatyggttygagttaggagygtygyggygttagygtatttgaygtygtaggaggattgtgygtatttgaagtttgggtgttaagygtttaagtttttgygtgtaaygaaatttttaaaggaaaataggattattagaagatttttttttttygttttttagaaaygttaagyggtttttttggtygtttttttaaagttyggttgttagagttattttagtagggttttgtaaaaagygtatagggataaagttttttttttaagaaaagtgtttaatttatttagtgagttatttttttttttttattgtttagagagtgtatatgaagaggtagaaattaygattaggaaaaagygagatttaaattggaattaaaaaagygtatgtgttygtttttatttyggygttagggttgtggtttttagggttgtaggttgtygyggttgttaggggttagatagtttttgaaggtaggttttgttttggttagaggaaagaggttttaggagtttttgttttygttayggtygttygtygggattttttattttaagygygtttgtattttgtttgtygtttygttyggagaattagtttgtttttttttttatttttaaatagatttaggtttttagtttygtggtygttyggtttattagttttggttggtttttttygggttatttygaggggtagttygaattygtagagttttggttygtygygygtttttatggttttgttgggtagtttggtttygttaygtttttagttttyggttttattagtttttatygaattygtatagtagttttttygygtttttyggggtggtaaggtattaaggtgtagtttaggttagtatygatttttttttgggtattttttttgtyggtttagttttttttttygttttgygatttygtgttttttaagtttygtygyggygattattyggatttatygygggygttaygtygtygtygggtttgygygtttygaggyggagttaggattaggatattygttagygtagggtagtttttagttttygtygttagttygyggtttttgtygygatttygtttattgygggttttttygttygttttygyggtygggaggtttggatttattttygggataaggtgattyggtaagtgygtttaagyggtygttygygattttttygagygagygagygtgyggggyggtgyggygttygtttttgttttttygttgttaggttttttttttttttgttttttttttagygtygttttgttttttaygttttttttygttttgygtttttygtttgygttttyggttgtttygagygtygggygyggggtagyggyggtagttygagyggyggggagtygggagttgyggygtyggggyggagtttaattttttyggttttygggagaggaaggggtgyggggagattttygtygygttygtttggtyggtaggttgggygaggggygttttggggygagtygttttttttygtttgtygagtttgtygaygygygtgttggaggtagygggygygggtttygggggaggagggtagggaagagaaggagggygtagttygygygaaggtggttattaattttggtttagattagggaggttttagygggggatygygtttagatggtggttygygg

SEQ ID NO: 765 - DNA, 284 bp, Artificial Sequence
  Description of Artificial Sequence: Synthetic polynucleotide
ygagagtagygtaygttagygtygttttttagattygagtagagtyggagagagagaygagagggtgggaggtttyggagtaatttttttttaggttgaagggyggygaggtatagtttygagaagttattaaggttatttggagatttttggttttttgaattttgygygttaagtygggatagttgttttgttgttyggagagtagttygygttaggaagagagtaaygaggaaaggagagggattttggygtttyggtaggygagaggygaggttgagyga

SEQ ID NO: 766 - DNA, 603 bp, Artificial Sequence
  Description of Artificial Sequence: Synthetic polynucleotide
ygttttgttyggttgatgagtagaattgtygggatatgygygtttyggtygaaggggggtaattttygaatttygggaattygttgtgtgaagtaggttatttttagggaygygyggggagttyggttttygygttatgtygyggygtaagtaggttaagttttagtattttaatttygaggagtygyggtttgygygtygggagtgtgyggaggtggtttygtaggtggygggggagtygggtgagtagygtygttggagtttygttygggggttgggggtyggtgtttagaggtttttyggattygygygggtaygaggatygggtaggggatttgaaagggygggygaagygttyggygtagagttttgggattyggatttgggygttttygtttttygtttttgtaaattatatttttttggagtttatygttttttttttygtttggatttttttagttattttttttaagagttagttaaygagtttgttttttaaataygttggaaggatgtttagaggattttttagaggttgttttygggatgygygggtattygagttttyggtttttttggtattgggtttyggttgygygt

SEQ ID NO: 767 - DNA, 6511 bp, Artificial Sequence
  Description of Artificial Sequence: Synthetic polynucleotide
ygtagggtgaataggttyggttaggagtygtagygtygtttatttgtatttygtttatttggtgaggtatgtygtggagttttaggttttyggttaggttygyggtatttagggygtgtgygtggggtagtagtaggtyggagyggyggtaggtatttttgygggygtttatygygttygtttttagttyggagaggtggggtagtaggtyggtygggygttygtggtgygagggtagtttygtttttttttggttttggyggtygggttaggtttgttgttggttgtttgtgggygtyggttggtgtagggggttgatggyggyggygtaygttttttttagatgygagtaggggtyggtygattgggagtaggttagttgttggtagggagggggaaagtagggtggyggttgatattyggygattttagtgtgggagaggggtggygyggggttgtagaggtgttgttyggyggaggagaggtgggggattygyggatttttattgttgttttygtygtggygattttggagggaaaaaaaaaaataggagatttygttagtgygaaatttygttattgygaattggtyggtatygtygggttaygtagagggtttygggggattaatygtatttygttyggyggggtttgtttagggtyggaaggtattygggggtaatgygtttygaggatttygttgtaagtaaagagtgyggggagggaggagagtttggtgaaagatttgggggaaygagtttttaaagttyggyggygaaggtttaggygttgtttttaagttygaggygtttggaggygttaagttygaattttgggttttgggttagaaaagttygtggtyggagttyggggygaaggagttagagttyggggygaaggagtyggaygttyggtgtagagttatttygtggagttygtttatgaygtagggattgttggaggtggtagygyggtaggygyggatagagtgygyggygygggaaatgygtatttttttygttttygggatttttttttttaygttttygggataaagattttygagygggyggygttyggaaagtagggttygttattttgygtygttttgggaagtgaagagggagygygygtatagggyggttttttttgttggtygggtttagtygaggggagtaataagtgggggygttttgtattgttaagggtagtgttttygtaygtyggggygtagagggggtatgaagaattttggaaattgggtagttttgttygygtaygttttttygtttttgggyggttygatttagtttttaaaggatgygtttttatttgtttaggggtttyggggygtygggaatttggaggaatatggygttgtygttttttggyggaagygttygggtttgygggtaggggtagttttttagggttyggaggygtagtgaattttygygagttygtagttygagtttygygttttyggygtttttgagttygtttagygttgtttgygtttttttttttttttygttygtygtttttttttttttttttatttttygaaattttagtttaatttgttygataggttggagtattygygagtttttayggttttatttggtttygggtatttttattattattttttagtttttattttttttgaaagttaaatttyggttgttttygtgttttttygaggaggtagyggggtaggtgataagtyggttttggaggagtgttygttaaggtgtygttagtaggtagttttatttgatttttttggatagagatttygtgygtaaaagttaygtttgagggttgtagayggggtattttttygagaaaaygggaagtagggttgtttgtygtttaggaaagygttyggtaagttgtgtgggtgggatttgttattttttttttaggtttygttttygaggggaggttatttaggaaaaggttttatataggaaaggggtttygtagaaatggattaaggggtgttyggagaagtggatttygttttatygagaggttagggtttttatgttttygttttygatttyggtttagtggtttttgtttttyggattgttttyggyggggyggggttgtatttyggagttttagtttatttygtagtttttttygtatttgatattatyggttattttttataatatggygttyggygttttttaaaatagtygttagttaaatttaggatttttttagtttttaagyggtaaatttaaaatyggggttayggtgattaggygtttgtygtygttttygtygygygygggttttgttgttygggttattggataygtatyggyggttttgygagygtagatgttgtygtygygagtgttaagatygtttygyggayggggaaagtygygttygaatagtgtgttttggygatagtygggggattygagygttttaatgagaaggaaattattataattttttttygggggtyggygyggaggtttaggygtygggyggggyggtttttagttagttttagtttagtttygtttygtattygggtttggygtagygtygagttttaygttgtgagggaygaagygyggagttagtgggyggtgtttygttgatagtygaagatttgygaggtttgggtttttygaygygttttttttttgttatttttatygtaaatatatttgagattggtagagttgggggaagggatttaaatattgaaatttatttttttttygtttaaayggtttttattygtttttttaaaagayggatgttatttggagttaagaaattgygtatttggggagygatttaataatyggggtttttttattttttaaaaatatattttattttatttatattttattgaggtttaaggtttgagttgggattatgtagttggagttttagtgygttagagaygtttagtttttttygtgggtatagygyggtttyggttttygggygggaggagagaggaagggatttttggggagtttgttttaagggtygtagaggtagtagayggttttattygtttaggagttgyggatagyggygtttygtygttgtygttygaagtggtatttttygyggttggttgaggttagggggaattygygygtattggattagtttagyggttyggttttgttttgttttgyggaaygtyggttttgtagttgtttttggygggtyggttatttagaagtttttattygttttgggaaagaagygtygggtaggaataaaattygagygttaygggtaaggtgagggtgaggaggtgtaggaagttgggagagagtttgtagagagttttygattggagaggtagatatttaggttttatatgtttagatagaaaaygaaatttttttttatataaaygttgtttttttttttttttyggtatttgttatttaaatttgaaagtaaagtgtaatattaatttttaaaatttaaattaaygaaattttttggtttagttattatgtagtaattgatttttattgtaaggggaatatygttaattttygagggygtatttgttgggaygttttaattggttttttgggttggatttaaatattttgtggggattagaggataagattatttttatttgatattgaataygattttgtaataattaatgtttattagtayggtgttygtatttgtagtagatatgatttttttatttayggaatggyggtatttattgtttygttgttttttttygggttygtttgaattttagtatttatttagatttaggtgggtttaaaagaaaataataataataggygttttttaagggaaattttttttyggttttagatagtagttaaattttaggtgatttttygatyggaygygggaataaaatttggaagttgaaattattgagatttttyggttaagtatatttgtagggttttgtattaaggagaatagtgtataaaaagatatataggattttgatatttyggttttaaaataggtttttgggggtaaaataagttatygtagaagtagygtttttggtattagyggygggggagggggatatttgttagaagtagaaattagatttaggttygtaggtattttagagtataggtttaggaagatgggttttagattygttagaggtgyggygtttttttygggygtttgggattttttgaygggtgtygttgggttgttygatattttgggttttttagttttyggttttattttttgattyggtttgaggtgtagtttgaataagttgttttgtttgtgttggtaagtttattttttgtaygttggggttyggaatgggtaagaaggtgtttattttttattttaggttttggttttttttttttatagtaatattagttaaagttgttyggaggaatygatatgttttttygtttgggagygtttaygtaggaggygaagggagtygatgggtattgagggttygygtagtatygtgtygtgggtttaaaggatttagaggattyggaatygtttggtaaaggttatttatttttaaggagtttttttggatttyggygttgttttttttttaatgggtaagygttygaattggagygtaattttygygttttttgtayggaaggtagttagaataaattttttgttttttyggtaygggagatttttttttaataygtatattttyggtttttgggtyggtatttaggtaygygygygtttttgtgaggaagttttaatttttttttgattttaatttttttgtttagtagagtygggaatygaaggttttagtatttaagatagtttttttttaaygttttygttttttgtttaygtgaagaygyggattgygtggtygygtttaagatagtyggtatyggtagaaggggatttttttggaatttyggaggtttygtagtygtttggagaagaggatggaaggttgtygggggtttttttttatygttttttagggagtttaaatttatttattttttggaagttttggatttaygtttttatgaaatygtaaattaggtttttgtaatagygggagygttttaatagygygttatttttaaagaggygygaggtggtgtttttggaaatagggttttyggttttaggtttgagttattygttatttttgtttttattttagayggaagaaggyggttaggygggtagagtaagattygggtagatttgygattttttttttygttttagggaggggattttygagtagaagatggaggttttygagygttttygtagatttygygttaygygtyggaygtttgtttygtttttygggataaygtgagygtyggtagggattttagtaagtggtagattygttaggattaagtaaggtggaaaggtyggggtttgyggtaaatttaggaggagggggtatttaygttygttatttttttttygyggtattggtatttattggatygatattggygttaaagggtattttgaagtatttatgtttagtaagggtatgttttggggtattatagatattaagttatagttattttaaaataattataaaaatgattatygtaaataatagattgttttaatagggygygaagyggtygtygtatatagaygtttttggttttagttttattagatttagtttattgttygtttttttgygtttygygttaggtygtatgtttttygtttagaattttttgagttttaatttttttttttaaataatttttttttttaaataggtaaagtgaggygaggagttgaggggtttataggtttttaagttttygaggagggttygggtttaygttagtttyggttygttaaaygagatttygtgggtatagtttttaatttgataattatttgttttattttatagtaggtaaaagtgaatttttagtygtttaattatttgaaagttataaaggtgtttagggttgaaggttatttttttagyggttttattagggagttygttagagatatgtttgattttttttttgttttgtttygggggggattttygttygtyggaggttttataygtttggtygtgggatggtagatttttgttatttttttattaatatttyggagtttattygtaygtattttaatygttyggagygtaggttygaggattaaggyggtagtttygtgttttttgaggtttttttygtttygtgttttgggtygttatatatttttyggttaagttyggygtttttaatttagaatttggtygtttttaggygtggagtaggttattgttgttagaygttgygyggattygtttttttgygttagtattgggygataggtagttygggtagtatttaggagttattttgtayggttttaggygttygttttatttagygttatttttygtttttygtagygagttttttygtagttttttttttttgttagttttyggggtygt

SEQ ID NO: 768 - DNA, 1560 bp, Artificial Sequence
  Description of Artificial Sequence: Synthetic polynucleotide
ygttttttaatygaatttttttttttgggaatygtagtttagygyggtaattgagttatygtaatygggyggtggggaggaagggtggtttaggaaatyggygagggagaaaagyggtggaagggagagttttttttttggagyggttttagtagtataaagtgttggttatagygtttttttygtttttagattgaygagtagtggygtggagttagygyggaggttgttttttttttttttygagttygtagygyggagygyggtttagtattaayggagtygggggyggygtttttgggatggaaaagggttaaaggggaggagtggggtgggggtgggggttttattggtttattataaaaggatygttyggttgttyggtttttgtattygttggaaagyggtttygagttaggggttattgtaaagttagggtgygttatyggayggagaggggagagttttgagtagagtgagtaatatygtagttaaggyggaggtygaagaggggygttaggtattaattttygygttgttttagtttyggaggygttttagagygttttttgttttagtagagttattttgtttgygtttgttttttagtgtttttaattttgygttggaagaaaaatttttygygygtyggtagaattgtagygtttttttttagtgatttygggagtttyggttgtagtyggttttgygygtttttttaaygaataatagaaattgttaattttaataatttagagtaggttaaygaggttttgttttttygattygaattaaaggtttttygtttygtgygttgttaygagyggtgttttttggggttttaatgtagygagttgtgttygaggggttyggaaggygtaagttgggtagygatatggggaaygyggagygggtttyggggtttyggagttttgggttagtatttaygttgttgttgttygtygyggygttattggtygtgtyggaygtattygggygttttttygaggaggaygaggagttagtggtgtyggagttggagygygtttygggataygggattaygygttttygtttgtaygtttttgattagtagttggatttggagttgyggttygatagtagttttttggygttyggttttaygttttagaaygtggggygtaaattygggttygagaygtygttttyggaaatygatttggygtattgtttttatttyggtatygtgaatggygattttagttyggttgtygtttttagtttttgygagggygtgygyggygttttttatttgttgggggaggygtattttatttagtygttgttygtygttagygagygtttygttatygtygttttaggggagaagtygtyggtattattatagttttattttttgyggyggaatyggtagggygaygtyggyggtaygtgyggggtygtggaygaygagtttyggtygattgggaaagyggagatygaagaygaggaygaagggattgagggygaggaygaaggggtttagtggtygtygtaggattyggtattgtaaggygt

SEQ ID NO: 769 - DNA, 600 bp, Artificial Sequence
  Description of Artificial Sequence: Synthetic polynucleotide
ygtyggyggtggagggaagtttygttagggggygttgaaggttygtaggttttgygatygttttttttygtagggygtygttttygtttygtttattttgtttygygttaggygtygaaggggtagttaggtaggaagatattygttatygtttgttttagtgttyggatttaaagggaagaaattaaggtttttaggatatttagttgagtggyggaggtygaattygaattygggatygaggtagagggygtttyggygggtggtggaggggtaygyggygtgtaagtttttaggygtttttattttttttattttyggtttaatttttaagaatgtgygggagtyggggtyggaagygattgttygygtttttaaatyggttagaygttggggygtagggygggyggagygggtttagtttttttttatatggttyggtttygyggggaggagttyggttygggaygttttygtttttgttaygaggttagygggggtygggtyggygygyggggygtagtaatggygggygtygggtgttggaggagtygttttyggggtyggaaagatttygagaggtatygatttygagatygg

SEQ ID NO: 770 - DNA, 1021 bp, Artificial Sequence
  Description of Artificial Sequence: Synthetic polynucleotide
ygtyggttataaattgtagtttgggaaygttttagtygtattttagttygttttyggggatygtygttttygaagygtaataataagtaatgtagtttgtttatttattttygtatagatttttagtttttttygttttttagtagaaaygtttaatagaatygttaggattagygagtaygygtattttagtyggtttygtttaataggttygaggyggagaaatygttttagtagttttttygtttygttaygtgtaggyggyggttgttgyggaggygtagygggttggygtggttttttggagygygaggygygttttgttttaaggtttgtatgattgtygttygygygtttttttttttttttatyggttttygaygygyggagtttttygygttgggttttttgtagtttagggatggggttgagtggygttttttygtttggtgtygtygtygggtttatagttygatttygttattgygtygttttygggttygygttgatgggygygaggyggaaggattggattyggggttgttatygttgtagttagagtattatttgtaggtggtagttgtagttygggtttyggttggggttggyggggtttatttgggatggttttttggtttttgagtgygtygtttattyggtyggagggtgtaygttttttgtaattygggtygaagtttatgtttagygtttttgttgtagattgtttgatttgtygttgtttygttggtttyggggttygtayggttggaggygtagttttggtyggggatttttaattttyggygatttttggttygtgtgttggtggyggttgtagttgtagygtyggtgggttgaygtggtttttyggagttgyggttygtygygtttaagggttttataggttgygtygtttttgttagttgtttttgatttttgttttgagygtaggatttggggtttggtattttgtagttatagggatgaggttaagygtyggttttyggtttygtggygtygt

SEQ ID NO: 771 - DNA, 1281 bp, Artificial Sequence
  Description of Artificial Sequence: Synthetic polynucleotide
ygyggtgtyggygygttagtagttygyggttaaggttatttgtttttagggtttyggtatttttgyggggaggyggtaggtagaggaygygygygtagtygygtaggagtttttaggygagtgggggaagtatygtaagagaygyggatttggagygyggttattgygttatygtagygatttgggttatttaagtyggygggattgagaggtygttgygygtgggtaggggtttagattgygttygyggtgtttgtttyggtttttatttyggaaygattgtagttttgyggggttygtygtttatatygygttgaggaygttgtttaagttaggygttygttttygttygyggttttagtygttygtagygygtygtttttagaygygygtggttgttggygagggttgagatygygttttygtyggttagtttttagtagtagygtattttttttgtttygygttttygtttyggattygygtygtygtagtttygyggtgatgagtttygagtyggtttygtygtygtygtygttttagtgttttggttgygatygygyggagtygatygtttagygtttagaggagggygaygaggtttttygygygggygattaygagatggtagtygagttttttygttttatgttagtygggttggygtagtyggatygyggtttgtgtttgaggttgggggaygygttggttygygtyggtygttttttygaagttttgggygygtttygyggygtygygyggttyggggygttgyggtyggaggagttggaagagttggygggyggtttggtgygygtygtgggtttgygygatyggtygttgttygyggagaattygggyggygagttygaggygttyggygagggagggtyggtttyggagtttygygygtttygygatttgttyggttgttygygttgtyggyggttgttgtataagtyggtgaygttgttttgygggtttatagtttgtaagygttgygtggagttagggttygygyggtygtaggtgyggygygtgaaygtggtgttgagyggtttgttggagaagtgtttttyggtygagtgtyggttgygtaggttggtaggttaggygyggagtttgtagygttagtagtagtyggaggtygygttgtttaggtgygattaggttttggagttgggtgagtyggttgyggggygggttygttttttttatatttgttyggtttagtagyggggtggggagttggtyggtgggttygaggttttgggttttyga

SEQ ID NO: 772 - DNA, 2029 bp, Artificial Sequence
  Description of Artificial Sequence: Synthetic polynucleotide
ygygaaaagtygagtygttgttggagtttagtygygtgygttttttttattttaygttagtaataagttgggagggtgttygtttttagtagttttygtagygtatttygaataaagatttttagtttttttattttagygtttgggtttygygggtttatagttaatttttgatttaagtgtagttttttttgttyggagtttttaattgatgtaaaygtgagygtatttgtattyggtttagygtagtttttttttttttttttttttttttygttagggtgtttyggygttttygattttttaattttggaaaaagagygatatygaagttttaattattttagattagggatagagaygagatggggatttaygayggtayggttatgttatagatttttaaagattaaaataaaaaggggttggygggtgtagayggaygggaaagagataggaataatttttagtttaygtagggtattttatttgtgtagaygygatatatttaaatttaatatattattaaagttagygttttttyggttttatttaatygttaatgtttygtygttttttaagtttygtttygtttagtagattayggatgtttgggatattttttttttatttttattttataaatatatattygtttttttaaaagaaataagaaagtagagggaaaatttygttygtttaaaggttattygtttgttygggtygttttggttagygagygtttyggttataggaggayggggttygaattyggtgagyggtygttaggagygtagtagatttttttagygtgygttaatggggaattaagaggttttattttttggtttyggtygtttttttttttttyggtgggtygttygtyggggtttttyggggtatttttagtttttatttttttgttttttttttygyggttttttattttgygtattttttygtygggtttyggagygtaygtagaggttttaatttttygtagagttygtggagaagtaggagagtttggaattggggyggggygggggagggtgagaagagggaggygygggagtttagtttgggaagygggaggygggyggagygygtattggagttatttttttygggagggtttggtygyggttgtygatttttatttggttygtyggttgygtttggttygttttggttttyggggtgggttgyggtttttgtttygyggtygttatygtyggyggttygygttggygttygttttttygygggygttttagattyggggatygttatttggtagygttygtaggttaygggygttygtygttttyggaatyggyggaagggayggggtggggggagyggaggggyggggaggggaagaagagyggtatygggygggtttttygtygtagggtttttttttyggttatygtagattttttgatttttygtttttttygtttttygttatttaaagygtagygagtygyggyggygaggygagattaagyggtaagttagtgtagyggygagyggyggggtttyggtttttgatygagttgyggygaygtttygtgtttttttttygtagttygygttttttatygttygttttygggggtttttygygyggtgtttagygygttaggtggagtagtygggygtygygtttyggttttttttyggtaatygtagtyggggggggggagagttyggagyggygygagagtttttaattygygygtttayggtygtyggttttygyggttatttygtttttygtaggttttygttaaaattyggagaagyggagygygttygtgygaagtattgggtggttttagtttygttattgygygygttttagygttttagaaggtagggggtagttyggggatyggggtttyggagtttygtgggaggygggtaatatttgtygggattygagggygtgtttgagattgtggtttgaggtgttgygtttttygattyggggtagygggygttttgtagttgygtttttyga

SEQ ID NO: 773 - DNA, 1793 bp, Artificial Sequence
  Description of Artificial Sequence: Synthetic polynucleotide
ygtttaaaagyggagaaggyggagttttaggtttagtyggyggtatygttgggaagtgagggygttttggayggygagggtaatttttattagtttgattgtttgaaatgtagtayggygttaggygttttttagatttttttgtgattttaataggttgtgattttggygtgggggtttggaataygtgtgggygttggtgygggggagagggaatggygaygyggaagagtaggatagaygyggagggttagagagtagttttattaagtaagttggtggagggttgtgggttttattattttygggttyggygttagggyggaaggttygggggtgtygtttaggttaygtygaygygagygaagttttggtttatgtttaggttgttttttaygtatatttygtatttgtygttgttttgaggygtggttyggygaatggttagygtygtggtggtgttgtygatttygaagaatattttgyggaagggyggyggggaggagggyggagtygtggttagtataygggygtattgggyggggttttttagttagttttgtttttygttgtttagttttygttttygttattttagttagatttttgggtttagttttatttaggttttagttttaggttttggtygtgtygtaggtttyggttttygtttgttatttttttygatgtttttttygtttttggtttagtttaygtygggygtaggtttttttaggattttygtagttagygttayggtggtgtttttgygygttttagtgttgtygggttttttttgaattttygtygggattagyggaaggaaaggggagygaaatttygtgaaggattyggagatgaggtagggtattattttatyggttaatattyggtattaaatatagatgtatttaaattygtagtgtgaygttgagtaaattattagtttttttggttttatttttttggttgttaaagggatttatttttgttttttttatttttyggggtygaatagaggattaagagagataaggygggygaaagtttttgaatgtttatatatttygyggtgttttagagatygtttygggtagtggaaattgttagagttgggagttagaagattygggtttaattttggttttgtttttggtttgttgtgtgattttggggattyggagtygygtgatggaagtttatagttgattgtttagttygggtggagttggatttygaggtagggaaggaygtatttggttggygyggygatgygttttaggtygtgtttagagttgggttggyggggattttgtagttaggtttagaggtaaataygygtagttggatygggttgygggttttggttgagtggtgttggtttgygttttggygttgygttyggggygygygtattttttaygaggatgygygtygagtyggagtattggtygaaggggttggtgaygttgatgttgtattggtttaggtttgttagttygtygtygygtattattagtgttattaygttagggttttygaagaygtagyggtatttgggatygttaygtagttttttgtygtttttattttagyggatgaatgggttygggaaagtygaaatgyggtaagtgagtttggtygygttgttttygattagtattaygttttttagyggttttagtattygyggyggttttttttygygtagtttttttygggatttattygygggtygagttagggtttagagtttttaagataggttyggttatagtttttatygygagygt

SEQ ID NO: 774 - DNA, 2697 bp, Artificial Sequence
  Description of Artificial Sequence: Synthetic polynucleotide
yggttagtgaaggtgygttttgygttagggattgtgtyggtagatataggtattattgatatygtttttagtttttyggaggagttttyggttttttatttttagttttagtttttttttagtyggttggtgggyggttgggagtggggatattggatyggaggggattttttaygggagtattygttgtttttattygtttyggaaygyggttggattyggagttttygatygtagttygygtaygattttygggagtttgttttygyggtygtygatttaygttygygttgtygttttattgttaggtggttygagagatgtaggaggaaggaggggygygyggggygggyggaggagggtggagtygtyggygygttttttttttygggtyggtaggygggyggygyggygggttyggygyggyggtagaggaggyggygggygttgggagatatyggaygttygttyggttgygttgyggtttaggttttygttygggttygattygttyggttatygtyggttygggygygtatttgtygggtaagtggygttygagtttttgtygttgaggttattatygyggttattttygtygtygtygtygttattgygyggagtttttyggttttgtttgygttttttyggttgyggtttyggttgyggttgyggttgyggttttygggttyggttttygggtttygyggattgygtygtayggygtyggggttygggggtygttagttagttygtttttygtygggggtgaaatttygtttaagtttgggttttggggagaatttgttgaagttaggagtggttyggggyggggatagagatggtgggagtggggggagggaattygtttygggttttttattagggtygtttagtgggtgggttgtgtgttygttattttggggygttggygygygtttttagggaaggggygagtgggtygtygggttatygagtagaaggagttagggagyggggttggygtggtygatttygyggattttygygaggataaagtttggttttttggtygttttgyggagygtttgtttgggtttagygyggagagttgaaagtgtygtatagaygygtttttgatygtatttttttattttagttttygtttttttttttattttattyggttttggttggggtaggtygtggaagagaaaggygaaggggaagagggaygattttttaatgaaggtttattaygtgttaggttttttgtttggygttttttgtttttaataagagtttttttaattttgyggtttttaagtgtgtgtagggaggggataggggggaagattttattgtgtattygggggtggtggtttygtygaatttttatagtttttggttttygtagtgaatgaggttygyggttggggtttttgtatttaggtttgtgttttttttygyggtgattttgagttttattyggttgyggygttttttgagtttgttttygtttttttygtagttgyggttttagggttatgyggaggtttaygaggaggtyggyggttaygygtatttygtagtttaggtggtttaggtttgtatygyggyggtttyggygttatggagttttygtattygttgayggygtattaygatgagttttaagaggttaagtaygtgagtygttgyggygyggggggygygygyggggtttttttgttttygggtttttygttgggygttgygygtagygttatyggggttyggttygggttgtygygttggaatyggygygaggtgtgtttgttgtyggggttggtgttygtygtyggtttttgygttattttggyggttatgttggtttttaagtatttgggttyggtygyggtyggyggyggygtttgtttygagggttgttttgagygtaaggttttygygygygtygttygttttttggtygttaatttggaygttagtatygatttatgttaggatttttattygttygtttgyggyggttggttgyggygttaygttattttygaygataagtttatttatggtattatygyggttatyggygagtaaaaygaggagygtttayggygtttgttggygyggttygggggtgggtttggyggygyggtttagygtaaggtgygygttttttttygttygtgtttygatatgygygagatygagygattgggttygygatttatgttagaggttatygaggattgygggggttgggatttgggyggygyggaggagygttygggggtygyggygygatgggattttaatyggttgttgtataaggygtagggygtgtatagygtygtygygtttttttygtttayggttagtttggaygataggaatttttygygttaygttattygygtgagtgygttttttgagygttttgttagyggtygyggattyggggygtagtggttttgtttaggggtttttgygygygggaggygggtgygtgagaggagaggagggaagagaygagtaggagaggggaggggaggggagygtatagaggtagagygygggaggagggygtaagtaatttttttggggtaattgyggtgtttagaggagtygygggagtygtaattttttagttttttggtaggtagtgagggttaggagggagaggygygtyggygggttgggttgaygttttygyga

SEQ ID NO: 775 - DNA, 1384 bp, Artificial Sequence
  Description of Artificial Sequence: Synthetic polynucleotide
yggaagggattygtyggttgygtttygtttaggttggtyggggtyggtgtgatygtgtgatttygtgtatattgygttygggttttygtgaatgatagtagtttgtaatttttagtyggagagtagyggtggttatygtygggyggaaagggttataagttagaatgtaaagygatttygtttygggtgtgggggatttygggttttyggttattttygaggtygggygtgttttgttygttttttttygttttgggygtyggggygattttattttgygttttaagttgggggttttttatgttygtygtygtygagtttttygtygtygaggygttggtygyggttttygggttygggtyggggtygtygtygtygtttagtttygttagttttyggttggtggtygtgagttyggttygtaggttggttattttttggttggtygattggatygttttatygatgyggagygygagttgtttattgttttttattatgtttaggattttggtttgggggygagagaggtgataaagagttgtatgatgygyggggggygygyggtygggtattttyggttttatttgttgtgtttttygyggttyggtttygttygygtttygatttttaggtatyggtagygtyggttttttyggtataggaatgatagyggygtttttagttttagtygyggyggtggygaggyggyggggggaggaggyggaggagaaaaaagaggaggagaaggaggaggaggagtagygatygtygagatttyggygggygggygtygagagttgttttaagaaggatatygygygttattaggtattttttaaatggagtttattattygtygtyggttygggagggggtttyggtyggaggttgggggtatttttggtttttygygttttygtatttyggagatatatttttygggggggyggaggyggyggayggtagtygggagggggttaaggtggygtttttggygaggggtaggggtygtttggatygaggtyggttttttgtttttttttttgagyggtggggtagttttygttttggagaattggtgtttygagtygtgttaaggttggggaggtgttgggtgttyggaagagagggtgtttggaaagggggttttagaggggagtyggggtggatttttatggaagggagaygtttgygttagtttaggagtggagttygtgttttatyggttttttaaattgygagtaygaaatttttagaggggagttgagttggtgtttygygtgttttttattttttattttttattygtaggttagatttgygttgtttattttaggagggagygtttatttttttyggygtgggtygttggtgttttygt

SEQ ID NO: 776 - DNA, 421 bp, Artificial Sequence
  Description of Artificial Sequence: Synthetic polynucleotide
ygagygggtagttttggaaggygttttgtaagttygttttyggttaygygygtttttygggttttggtttygtatttttgtygtygtttttaygygtttttayggatttygygygtttttttttttyggatygygagygtatttatygatttygattgtttyggttygtttygaagttttygygttgtagtttttagttttaggagtagggtttttgggtttaygtttttaaggtaattattttttaggttggttgtgaygttataaaggtygyggaggttgggygtttgagggttgggtttgygggtygygggatagggagggygyggggtygggttgttgggttygagttttgggtaygatgttttttttgaygtygttaggatagygtttggtttaggtttgggtttggtgaaygygg

SEQ ID NO: 777 - DNA, 2606 bp, Artificial Sequence
  Description of Artificial Sequence: Synthetic polynucleotide
ygtatttttaygygtaatagagttaaaagtgttggggygggagygggggtygggaggtaggggaaagyggtygggggaaygttggatttgggttttaagtgtaggtttgggttttaaatgttttatttttttttttttgggggygggtaagggatagggaggttgtygggattayggatgggtagttayggtggagygtyggygaygygyggaggagtttagttygagtggggttygtttgtattggygtygtyggtttggygggaygagttttyggyggtggyggaggtggygttagggttttygttttygatggagttttygttgttygtgttgtygtttgatagtaggygygttattygtaagtyggtttgtagggtgygtaygtygttgtygaagttgagttygtttaggtygttaataagttgygatagtttagtttttatgtyggaggygttgtttagtagtagaggyggyggttyggttttygggtttagggagttttygtygttttttagygtttttttayggttattttttagagtatttaataagttttygtatttaaagtgtatggygattattagygtaygttgygtttyggtttttttttttgttggatttttttttgtygtayggttttttttttttttygggtagttttygggttgttttttttttttttttttttgtagtttttgttttagttgttygtygagtaggttttyggtgatggagttaagtttgggygygttgyggttgygttttatyggyggtttatagtagtagggttygtgtaggagtagtttgygtagyggtattagygggatggtgtgtgygtttattagtttttgttgttggtgaygygygtygtttygtygtttgaggygtttaaatttygttagygygttggtygaygtttggtagagtagtagggttatggtttgygttttttygggtttggatattagtayggygtggtagygtagtattayggttttgtgttttagttygtgtyggtatatttaggygaagattttgggtagtygygygtyggttaygtagtaggtgaygyggtgtagtaggtagaggtggttygggyggygtagygygygtttttyggygtgtattatgyggatattttgygtatttatygttagttttattttggtgttttgayggttygtttygtttttgttttagattttgtttatagtaaggtyggtgtagtygtygtygygygtttggatggtggtggtattgtttaggtagagtayggtgtaagttgggttttygttagtgatgtgtagttttttgygtttggagyggaatatgttgtttattyggttaagygygttttyggggtaygttygygttagygagttgagygtygagtagtgtaggtttatagygtagtttttgggtttggaygtttgtygyggyggygtttyggttagtagttygaatttgtgttttttttayggtagtattttyggagggygtttyggygtagttgggyggyggyggyggyggagygtygggtgygaggttygttgagttatyggtttttgttaggttyggttygggtaagatygaagaataaaattattgggagyggttttgtggtagggagttggggggaggggagtagagagagtgtttaggaatttygtaggaggtgygggtaaattttttaaaaaagaaaatatttagtttygagtgtgtaaaaaaggttggtgygggggagataygygygtatatagaattattttagtttgggtaagggygagagtaaagagttttaggtaagtaataaaatgtaagggagaaagaaygagygtagagtggaaaatgttaggaaaaaagttagaagygygygtgtaaataaagagagttttagtaatagtattygggatggtgtaagaatatgtaggaatttttyggygaaygtgaggtgggttttttaatatatataatttttaggattggggttaaaattygyggaaattttatagygagtgtgtttaggggtyggtgttttttattttygaggggtgttggagatggaaagtttttygtttgggttggttttaagttagtagttygtttaaagtgyggtyggatgttgggttyggttggtygyggygggtttygygtagtagtttygyggggatttattgtattttygtttygtyggaygtyggggattygygttyggttygtttagtgttygggttggtttggtygagayggygttgggtttygagaataggggaygggtatggtygggttygggaatygtygttattttatttttttttttygaggyggtgtttagtttygttttygggttttttayggtttgttgttygtttttgtagtgygtttttttyggtgttgygagyggygttyggttygtttgttttatatttttgtygttygggaggaagatttygggtaaatataggtyggygygaattattygtygygyggggataggggaggagtagagaagaggatttgttttgggtttygatttygggyggatttttggttttttaaagggatygygtgatagttattggtygagggagyggggagatygg

SEQ ID NO: 778 - DNA, 1094 bp, Artificial Sequence
  Description of Artificial Sequence: Synthetic polynucleotide
ygggttattygygtattgaagatagtttttgtgttttyggaayggttttgtygagygtggattagtaggagygaggygggtttagatgtgagaygtgtggggygggttttttaattaagayggttygtttggtggattttagtattygagtttgttgggttttaattattttttttyggttttggattgygttagagtttygygttgygagtttaagtttttagaagtttttagggtttygaaagygtttagaagggaatttaaattatggtagygtttagaggtatyggttttagttttattggatgtgtgtgggtygaggttttygggtaagggygagattttygtygtgtgggggttttygaaygygttttttygattygggtattagygaagtgtttaagaagtgttattggttatttaygtttagtagttttaygttgggtgtagygttttagttttttttaattttttygtgtygtttttyggttaggttggttggtygtgggygttttatttttaggaagtygtygttttgatagtygatggagatttggtygtagtggatggtaatgaatttttygggttygttgatgaagaaggttgygtagtgtagttgyggtyggtyggyggtgaaggtgaattggttttggaggtttagtatgtttaggtattttgggggaggagggtatggggtaataagtttygggttgtagtygtygtagygtygttttygggyggtygtttttygygygttttattttygggttttgtagtgtttagygtttygatttttagtttaggttgygttgggtttttgygtttygggygygttattttttttygtttttggygygttttygyggatygatttttagttaaggggatygygtttttggyggtttyggttagtttttttttygagatgttygygagttttttgtttttygtatagagttttatttttttygygtttygggygttygygagtygggtagtttygatttaygtagagygyggyggtayggttgttttttagttagttttygttttaggttggygttgaagagtaggaaaggatygtagttygtygt

SEQ ID NO: 779 - DNA, 2168 bp, Artificial Sequence
  Description of Artificial Sequence: Synthetic polynucleotide
ygygttataaayggggatttaatttattgttygatttttgttagaggygatttatttgygtttttgttatygtattttygttygygtttttgygttttaggtttttygttgttttttygttttttgtagygygggagygttgtttygtttggtttgttggttttttttagattttggttatttttttygtggtaggaagggttatatgtattgatagatttttygttggtggtggttgggtggtggygaggygtgttttygggygygtttaaaatttagtagttttttttaagtagtagttttttttatttygtttttaggattgaggatttagttttygatgtttttttattttttttygttttatttygttattattttttaatttttttagtatatttttaagttttataygggygtttgttttttttttgtattttttagttttygggygtttygttyggttgaagtttaygtattttgggatttaattgtttttaattattygygtagtttaagtttygygtttgtttggttttygtttygggagtttgaagttatygggtagtttattgggtgttttyggggaaaaggtttaagttgtagagatgagagaagtggggttgggggaggggagaggttttagaaggaagattaygaataygtgygaagaaataaaagttattaygtgtgtaygygygygggggtttaagggygygagygyggagtaygttttagggggttagggatagtggttttttgtagygggtatagtagggggygygggtatttataygaaagygtggtagatgaaygtttagtygyggggtttttttagtaygttgtataggtagttttgtattygtyggtatttgaygttgygtyggtagttttggttattygtgtaagagagyggtttttttagtaggtttattygggttttttgtttgtttyggyggtttttttttaggttatygtygtygttatygagygtggtygygygggtgtttagtagtagtaggtygtygtttttggyggttgtygagtttagtagtattttgtttyggtyggattttatattttttatgtygttgtttaagygtttttygttygtygtygtygtygttgygtygttttttatttagagttyggyggygtygttttttttttttttygygtggtggyggggtatggtattattaygggtatygygagggggtygttagygtttgyggygggggtagyggttttatgtgygtyggygggttttaaggaggaagtyggyggtygayggggygttygttagttagagatttttgagtygggggyggggaagtaggtagttagtaaatygttygggtttyggggygggaaaggaggggttgtagaggaggtygaggagttttaatttttaatagtttttagtttygaattttaaattyggatttgtttggggygttattttgagagggttttttttgtttttttattttygygattattatttttttttttttaaattgttttyggggatagagtgggggagtgyggggygtttygaggygygtttttaygygygtatatttagttttaggtttttttttttttttttttattttttaygttttgtagygaaayggttttagaagttttttttygaggygygagttyggtttggttttggtaggggttttgtagttgttyggaaggtgaagttagttttgtgttttgaggagaaattggagatgtaggtygttgtgttttttygttgttaygtygttgygtyggattttgttattttttygtaaggggtgagagygggaatagttttgttttgttttttaggtattatttagtttggaggttggagygtaaggtaaygtttygggaagtggtattygggttttygtataygggygagtttttagtagtttagtggatagattygtaggaygyggttgttaagttygygaggtaaggattaggtattttttygygttttattttagtttgyggattgtgattttttattttagtattagataagttygygagtaattgaatattttttttagtttatgggtggggtgtggaaagggygtaaaattttaaagtggttttttygyggtgagygagttgtttyggggttttgtttgattgtagygyga

SEQ ID NO: 780 - DNA, 1204 bp, Artificial Sequence
  Description of Artificial Sequence: Synthetic polynucleotide
yggggtttgaygttttgatttygggtygttggtygggggyggagayggggatagygagttgagtgtgygagygttaggggttttagttgtaygttttaggttttttagygygyggtaggtyggggygggaygaggagagttgyggggataaygtttgtggttgggttyggaggtgygggtgyggygygggataagygggtagtatgtttagggyggtygggagtttattgygttttggtygygggttaatagttygttgyggtttyggggygtttttygaggttaygygayggttygtatyggttttttygtttyggggttttttttgttattttagyggyggggtttttagtaattttgggttttaaggttayggtgagttagggtttygayggggaggttttgggagggaggaggttgygggagggtagygaggggtyggttygggagtyggtttgagggygygttgattttttgtgtyggtgygttagttttygygtttatttgggttgttttygttgtaggggagatttatygagtttttaygtagygtaggttttygtagttygataagaaaattttgttgtggatagggygttttaaatygatggaggagatttygtttyggatttygtaagtgtggygatygtygygygaaggagagtyggttttyggtygtaagggtgyggggtgatttatttttygatygyggttatttaggagygaaagyggtygtagtgttaatatttygtaatattatttattatatayggagtttatttatatatatatttygtttttagtgyggtgtgttaagagttaattaagtttatagggagattgtagaaggtgggtgaaaattgagaggtttaggggatatttttagtatygtttagattgtyggtttttagtaagtttygaattgggaggtagtggggtttttgtgttaaataggttayggttttygygagtattyggatggttgtygggaygttagatygtaatttaggttttggtygggggygtttttttattttatttaaggaaggggttttttgattttggtttgyggggyggttgtggygggggggtttttggaaaaaagaygtatttatgyggtttttttttttggggtaggagaygtttggyggaygtgtttttgtagttttttaggtttygggtttatttagggtgggaygygygg

SEQ ID NO: 781 - DNA, 1770 bp, Artificial Sequence
  Description of Artificial Sequence: Synthetic polynucleotide
tcgtttgggtttttaattcggggtcggtatttgtttcggcgttttgtcgttgttttaggtcggtggtgttggatttcgcggcgtttgggtagaaacgaggaattttcgttaattttatagggaggatttatttttagtttttttatttttttaaaaaatatttaaattaaaataattattataatttagatcgtgggtttttgcggacggggtagtagagggtcgggggtaataaggtatttcggtagcgttttttggcgagaggagagcgcgtaggtttttcgttcgcgtttcgttttgtcgtcgtcgtcgtcgtcgtcgtcgtcgtcgtcggcgttttcgttcggtttttcgggtttattttcggttttttatttcgtgagatatagacggtagtttttcgatcgagcggggtataggttgaggcggcgttagtataattgtcgtcgcgcgtttcgaggagattcgggtacgaggaaataaggagaaattaggatttttttttcggaatcgatcggtagtttcgcgttttcgcgcgatatttttcgtagttatttcgcggggcgggttaggatttggggacgcggttcgggaagagtcggggcgggcggcggcggcggcggtacgggcgcgagggtgcgcgtattgggattggagaggagtgagtggcgggttgggcggcggcggtcgtagtcgcgggtgttttttcgttttatcgtttcgtaggtagtatcgtttttcgggtcgcggtcgttcggtcgggttttttgcgcgttttcgggttcggaatcggtatacgatgtattcggttgcgttttgatcgtcgtcgcgttttagtttttgtcgcgatgattttttttgagtagtcgtagtagtagttgtagtcgtcgtcgttagtttcgtcgaattatgtggtgattattatcgagaatttgtcggtcgagggtagcggcggcggcgggagtttgttcgttttttttcgggttggcgtgcgttagaggattcgtaaagtgttgaataggtgagcggcggcgtcgggcgagggcgcggggggcgggggttgcgggcgttcggtttcgggtttttttcgtttttggggcggtttacgggttttttgggacggggttgcggtcggaggagattgaggagatcgggcgacgacgcgtttcgcgggcgtagagaggtcgcggtagttttgtttcggcgtagggagttttggagtggtggagttgtagttggttcgaggcgggagttcggggagaggcggggtttttcgtatttagttattttgtatgtgtgttcgtatttatattttttatacgcgtgtcgttttatttttttttttttttcgtatttcggttttgcgatcgggggtcggggggacgcggggattcggttagggttgaggagggaggcgcggggttgtagagatggcgtggaagttttgggtttcgtgttgtttttcgtttcgtttcgttcgggggtttcgattttttgtcgggggaatggggtcgtagcgatagtttagtaggcggagggaatttatttttttagtttgacgttttagtcgtttttcggattttttttggttgggagtagcgaagagagggttagaggtttggaatagatttagtaaagtgtaaaatattgcgggtagggtgtgagtcggcggcgtttagttatttcgaagcgtttatgtcggagggggcgggtgtcgatcgtcggcgtttttagtgttggaatttgcgtagtggatttaggacgttgacg

SEQ ID NO: 782 - DNA, 1834 bp, Artificial Sequence
  Description of Artificial Sequence: Synthetic polynucleotide
tcgtttcggaatggggaagcggttgcgttttggacggagaggggcggggatttcgcgattgtaggcggagggagggcgggtgtcgttggcgtaggcggtgatagggagatatcgtcgttattgagtatttttatgtaagtttttttatttttttgtgtattagtgtttatattggggtaatgataaatgttgtgttgaaaaattatttgatggggttatggaaggaacggaaggaacggcgttttggttcgttcggggttcgcgtacgtcgttattaagtcgcgggggcgggtcggaggggagagttgcgttagttaggtcgttgttagatgacgagttcggggcgtgacggggtggagtatttttaaaaaagtgtatgtttaggatttcgtttagtgtatttttgcgcgcggcgggtcgggttgggtagttttataaatagtcgtggtgtgagtttcgaagggaattattagcgttttttgtttacggagttttaggtttataatggtagcggtcgttagtttcgcgttttttttgtgtttttcgtttttgtatttgttgtttggttggtttcgggtaggatgggtcggtgagttcggggatgtagtttaagtagggcgggggttaaatttgggaggttgtggattgtagcgggttttagaggaggggaggtttttggaaggatcggcgcgatttttttgaacgaatatcgcggttttttcgaacgtcgcggttttttcgaacgtcgcggttttttcgaatatcgcggtgttttcgaatatcgttgttttttcgaatatcgcgattttttcgaatatcgtgatttttttagatatgtttagttgaaggtatttagtttttttcggtggttttttttcgtcgggttcgttttttgcggttgttgtttgttttttaggttaggaggtttttggaaggatcggtgttgttttttcgaatatcgtggttttttcgaatatcgcggttttttcgaatatcgtttttttttcgagtaacgcgattttttcgaatatcgcggttttttcgaaaatcgcgattttttcgaatattgttattttatcgaatatcgcgatttcgtcgaatatgttcggttgaaggtatttagttttttttcgcggttttttttcgtcgggtttgatttttgcggttgttgtttgtttcgtaggttaggaggtttttggtagtatcggcgcgatgttttcgaatatcgcgttttattttaatatcgcgattttttcgaatatcgtgatttttttcgaatatcgtcgttttttcgagtaacgcggttttttcgaatatcgcggttttttcgaatatcgcggtattttcgaatatcgtcgttttttcgtatattgcgatttttcgaaatattgcgattttttcgaatatcgcgatttcgtcgaatatgttcggttgaaggtatttagttttttttcgcggtttttttttttcgggttcgttttttgcggttgttgtttgttttataggttaggaggtttttgggtggattagcgcgattttttcgaatatcgcggtttattcgaatatcgcggttttttcgaatatcgcggttttttcgaatatcgcgattttttagaatatcgcggttttttcgaatatcgcggttttttcgaatatcgcgattttttagaatatcgcggtttattcgaatatcgcggttttttcgaatatcgcggttttttcgaatatcgcgattttttagaatatcgcggttttttcgaatatcgttgttttttcgaacgtgtttggttgaaggtatttagttttttttcggggttttttttcgtcgagttcg

SEQ ID NO: 783 - DNA, 950 bp, Artificial Sequence
  Description of Artificial Sequence: Synthetic polynucleotide
gcggagggcgttcgttttgggattgtatttgttttcgtcgggtcgttcggttttatcggattcgtaggttttcggggtagggtcggggttagagttcgcgtgtcggcgggatatgcgttgcgtcgtttttaatttcgggttgtgttttttttttaggtggttcgtcggtttttgagttttttgttttgcggggatacggtttgtattttgttcgcggttacggattatgattatgattttttatattaaagtatttgggatggttttattgtattagatttaagggaacgagttggagtttttgaatcgttcgtagtttaagatttttttggagcggtttttgggcgaggtgtatttggatagtagtaagttcgtcgtgtataattatttcgagggcgtcgtttacgagtttaacgtcgcggtcgtcgttaacgcgtaggtttacggttagatcggttttttttacggtttcgggtttgaggttgcggcgttcggttttaacggtttggggggtttttttttatttaatagcgtgttttcgagttcgttgatgttattgtattcgtcgtcgtagttgtcgttttttttgtagttttacggttagtaggtgttttattatttggagaacgagtttagcggttatacggtgcgcgaggtcggttcgtcggtattttataggtattcgcgttcgcgtcgttcgtcggggtggtcgtcgcgttcggtaggagggagggagggagggagggagaagggagagtttagggagttgcgggagtcgcgggacgcgcgattcgagggtgcgcgtagggagttcggggcgcgcggtttagttcgggggttttgcgtgtagttcgcgttgcgtttagagttaagttttttcgtcgggtagttgaaaaaaacgtattttttatttatttatcgttcgtgcgagaggtagattcgaaagttcg

SEQ ID NO: 784 - DNA, 1218 bp, Artificial Sequence
  Description of Artificial Sequence: Synthetic polynucleotide
tcgcgtttgtagttcgtgtattttttttcggagttgcgttagggaattacggacgaattggaaggggtcgagaagggttttggttattatttttagttttaagttttttcgtttttttagatttgggatttttttcggggaggattttttggcgttttttggtagtttttcgtcgtttagggtcgatttttttatttttagttttcgggcgggggaggtttcgtacggtcgtttagacgggttggggcgggaagattgtagcggttttgggtttattttttgtttttttataatttttagtggagttgggttaattttaggtatagtttattcgagttaggcgaggtttagaaaggtttgattcgtttggtagttttaacggatttgttttcgtagtcgttgattagtcgttgacgagcggatttttcggtcgttatggcgattgtgaaatgtagggtggagcgtatgcgttcgaagttattcgcgcgggtagtttttgcgtgtttttttgcgtgtttttttacgtgttttttagcgcgcgtagtatttcgtttttgcgttttttcgagcgtgtagttttcggtgagggtagttttacgtatagtttttaatattttttttagcgtttgtagttttcggtgcgcgtagtttttaagtttatatgcgtagtttttattttgcgcgtagttttacgtatagtttttaatacgtttttagttttattggcgtagaatttattatcgtttgttttttacgcgttttattgggagtgtagtttttatttcgagcgcgtagttttacgtagtttttttatattttttttagcgtttgtagtattttttagtgcgtatagttttgttagtagtttttcggcgcgtcgtttttgtatcgtttcgggttataattttgttggcgattaagtttgaagaattttttgtggttttatttttttttttaggtttagttttagttttgatattttaattaaaaggttatacgttaattaacgaggtattaaaggggaagattttagttgaaagaaatgattgtaggaagtgtgttagggaagttaacggaatcgttggttcgtcggtggtgcgttcggtattaggaaagtttttacgatcgttgaggtatcgggtagttagtgttcgttgttaacgcggagggaacgggcggagattgcgggtaatacgtggtagagtcggcgtgagttcg

SEQ ID NO: 785 - DNA, 795 bp, Artificial Sequence
  Description of Artificial Sequence: Synthetic polynucleotide
cggggggttgggcggttgaggtcgggaggtgggagaggcgggttttgtagtttcgagagtttttcgcggttgtagcggtagttgttattttttggtttcgttttatagtatatttgagttttttgggtagtttcgagtttatagtttttagtagaggcgttaattgttttttttaagtataggtcgtcgcgtttttaattttttgtttttatttcggttcgttcgttttttttttcgttttttttcgattgtagcgggggtagcgttttggcgtttttaaggatttttcgttattttttttataaagtagcggcggtggcggcggttgttgttggatttttatattgtagttagtagtttaggacgttttcggtcggacgatgggtattcgcgtttgagtatttttcgggtaggcgttaggcgcgaaggtagggggcgggaggaaaggggcgggggaatttttgattttttggtggattttggaagttgtttttaaataaatatatcgttggttcgcggttgagtagttatttcgttagagtagtatgtggattggttcgtcgggtttttttcgtgttttgtgttgtcgtcgtcgtcgtttttgttagagtagtagttgtcggtagtaggagtttcgtacggggcgcggagtagggacgcgttgttatcgtttttttttgcgttttgttggtcgcgttttttcgggaggtggtagtcgttgttgtcgttgagaaattcgttcgttttttacggttggtcgtttggtgaggagttgagattttgcgttttcgttcg

SEQ ID NO: 786 - DNA, 686 bp, Artificial Sequence
  Description of Artificial Sequence: Synthetic polynucleotide
tcggttgatagtgttcggtaagcgggggttttcgttgaagtttcggaattggggagggggcgtttcgggacgtcgggggcgtcgtagggttagtttttgtgtcgcgtttcggggttgtgagttaaaaatatttagtatttcggcgtcgggattcggtttttagtgttgggtaagttggggtcgtcgggggatcggggacgagattgcgttcgggtttttgtgcggggttcgggggtcgtgattaagagatttagtatttcgggttaggtacgcggtttttggtgttcggtgagcgcgggttgttggggcgcgggcgcgggcggtttgggtttggtttttgcggggagttttcgggttgtgttttggggttaacgttttgattttcggggtcggtagtaggttgatcgtgttgggtgagttttcgcgggattattcgggcggcgggatttaggtggaaggcggcggttgtttcgcggtattcggttcggttttgtgttgggagatttgggttgggtttttagggtgggtaggagttcggggagttttagaggtttgtatgcgggggtgtattttcgtgtttttacgagtagtatttcgggtcgggtattaggtttacggttataggtgagattcgggcgtttttttattttttagtttttcggttttcggagtcggagggtggatcg

SEQ ID NO: 787 - DNA, 1565 bp, Artificial Sequence
  Description of Artificial Sequence: Synthetic polynucleotide
tcgtttttgtagcggacgtttttcgatttatttattcgatttcggtcgtattttgttttgtattcgtattttatttttagattttattttgttttgtcgtgcgtttaatagttagatgttgggtttagataagcgttttttcgttagtgtgtcgggatgagcgggggttggatttttagaaaggggtttgcgggcgtaggagttggggttcgcggtttggggtcggtgagttgcggcgaagaggttagggagggagtgggagggtttattttgtaggagcgcgtagtattggtcgttcgcggtgttttagagtcgggtcgtgtcgttttcgttgttcgttagtaggcgttgttcgtcggggtttaggtttagttagttgatgttttcgcggtggtcggcgtagatttttagggtcgattcgtcgttttttatttcgttggtagggcggggaataagaaggagttgcgtttcgttagggaggggcgtttcggggttcgcgcggcggtttcgtacgattgcggttcgcggttatcgcggggaacggggagttcgatttttgcggaggtacgcggcgaggggagggtgaaggattttagtttttcgttgtttttagtttttgggttcgcgaatttagggcgttgcggggggcggtttattcgggattttcgttttgggtagagttttgggcgcgcgggtagagagaattttttttttagtatcgttcggaggatttatattttatcgggcgaataaggtagttgcgtttttggtgtataaggagtttttcgttttttttcgcgtttacggggttggggcggggagaggaatacgggaagtcgagcgtttcgcgtttttttcggtcgagcgcggaataatacggtttagtttggtttttttttagagattattttttattcgatttttttttatttttcgggttgcgttttagtttttatttcgcgcgtttgtagtttttttttttcgtcgttgtgcgggttcgggggacggttttacgtgcgatttttttagttgttcgggttgcgtttttgggttttggtttttgttattttcgtcgtcgtcgtttgggttttttgagttaagggtcgggacgagggagggggaggcggataaagggtcggggtcggggagaatcgcgcgtcgggaatttatttggggcgtagttttatcgatttttcggttattcgtttttattaggtaagttaggtttttttatgttttgagttttaaggattttgttcgaggggttttcggggatttgggggcggttttttaatggagggtgcgatagggaaagtttcgagttcgttttttttgggaaattacgcgtatatttaggattttattttggtttggtcggagtggggatgaggtgcgagtcgttgcggggtcggtggagtcgggatgttaagtttattttttagtcgtcgcgggttttttcggtttggggcgtttttaatggatttcggggtcggtttgagttttttcggagcgttcggcggttggtttttattagggtagtttcggcgtcgatttcgttggggacg

SEQ ID NO: 788 - DNA, 1911 bp, Artificial Sequence
  Description of Artificial Sequence: Synthetic polynucleotide
tcgattttcgtttagagatatttgggaaagacgtttttttcgttagagtgggttatttagggagaagtcgggtagagttgttttttttcggttcgtttttcggagtttgtagtcgcgtttatttaaattagtttttttggaaagttagcgggtgcggcgcgttcgagtagggtagtttattattcgtagtcggtagttaaggtcgggaaagttggttttagagtagcgcgggtttgtcgggtgttgtttaaggtgttgaaaggtttttgcgggtagttggcgggaggattttgcgcgtttttagtttttcggttattcgttttgtttttttagtttgtcgttttgtttttttttcggtcgcgtagaagttttcgttttttttttacgtttatcgagtttttttcgttcgggtgtcgttaatttcgtcgtatcgggcgtcgcgttttatcgcgtttcgggtcgttcgatttttgtttttagtagttatttgtaggtgtcgcggtcgttgggtttttatcgtcgtttttttttatttttttttttcggttacgggagcggttttttcgttttttgttggatttttttttttttttttgtttttggagggtttgcgtttcgatgtttttgattttttttagttgtttggtcgtttgagttatggcgggttacggcgttttcgttttcgttttttggatttttagcgtttagcgattttcgaggcgatattttttaagaaggggaagggggtttttgttttatagaggggatagcgttcgtggcgtttcgagggtcggttgttgcggggtcgcgggaaggcgaaggtagtttcggacgcggagggcgaggggcggttgttcgcggttcgggatggcgttgtcgtcgcggtcggagttcgtttgtcggcgttcgggacgggttttgggtagggttcgtcgttttttttttttcgttttttttttttttttgcggcggcggcggcggcgaagcgggggggcgggggcggggaggcggttcgtattgcggcggcggcgggcggtgagcggtcgcggaaggggcggattcgggcgtttagcgcgggaaggttcgggggttcggtcggcgcggcgaggttgggcgtattgggcgttcgtacggggttatggcgagcgtcgagttttcgtttttgtagagtttcgcgtcgtcgggcggcgggaataaagcggtcgttttatttcggatttcgttgcgggtcgtagggttaagtcgggggaagaggggaggttgcggcgggcggcgcgtttcgcgttcgggcgattcggcggattagcgcgtttggcggcggcgagcgcggcgatatcgcgggagcggaggttcggtttagagggcgggcggtagagggtaaggatcgggtttggggagttttcgggcggtggtcgttgagggttcggacgcgttattttcgagttcggggtgcggttttttttcgggcgttttcggcgtggggcgcgcgttttcggggttttttggggaagagtcggtttttcgcgtcgtacgttgggagtttgatttgttttttttagattatgtgggttttttatttgtatattttcgaattatagatgaaaacgtatttaggattaagtgaattgtttttttttgagtttttttgggatagaaaaggaagtaggttttcgttttagtttcgttcgttttttattttcggcgttttcgcgtacgtttttttggggacgtcgtttgcgttcgtgtttcgcggggaagagttgtatttgggttcgtagcgttagtttagtttgcggtaggcggagggggtttagggtttagttaattatttcgttacgtcgtataggagttagtcggggttttcggttcgggagttgtcgtttatttattttttttttatttcgtgggacg

SEQ ID NO: 789 - DNA, 2213 bp, Artificial Sequence
  Description of Artificial Sequence: Synthetic polynucleotide
tcggttttaaacgtttttttagttatttgtgaatcgcgaaggagtcggttttcgcggcggggattttgttattagtattttcgcgggtcgaggtcgttttttcggtcggtttttcgttttattcgaaaaggaattagagtatttatttaagacggtgattggtagggtagattaaggtgttttggtttcggttttagtttcgcggtgcgtttcgttcgtttattttgatcgggtgtaggtagttatcgtcgcgtagggcgtttaattcggcgttcgtcggcgtttcggcgtcgttttgtaggttgcgggtgagatgcgcgatgtaggtggtggttagtagtagtacgtttagtttggatagtttggtgtcgggcggtacggacggtagcgtgcgttgtagttttaggaaagcgtgtcgtagggtttgtattcggttgcgttttcgcgtcgtattcgtcgtcgtcggtcgttcgttttcggaacgcgagtcgtttttagggttcgtcggtttcggttcggttcgttcgggacgcgagtcgcggatggcggcggttaggggcgcgggttcggcgttggcgttgagggggttgttcgttgggcggtcgcggtttatggtagtttttcgcgtcgcgcgcgttgtaaaggatcgaaggtgcggtgaggtcggggggcggtcgggtttaattcgagaggcgtagttttttggtttttttcgtgcgtttattagtagtttaacggggttaagggcgtttttaagcgagttcgttttgtttgggacgcgatttgttttcggacgtttggggagagttgcggaatttcggagtttttgggttttttagaaggataagaagaggcgtagtgtcggttttgttttttaggggtaaattaagtaaaaggtttattttattcgggaagaaagatttcggaagtatagtttaggattagtattcgttcgcgtttgggtgattttatttaattcggtacgtacgagaggtggcgcggttttttttcgtcgacgtcgcggaaaattacggtttattagtcgttttcggttttttacgttaggggggatttttgttcgaggagcgggggatttttagttttatttcggggtacggtattcgttatcgtttcgagttcgagagttgcgtagtacgcgtttgacgggttttttattttttttggagcggttgagtggagtttcgtttcgtcgtgagggcgggcgaggggcgtggagtagggtttgtgtggttagggtcgcgttggttattttattttcgttcggtcgatgtttaagtcgacggttgtttttaattttcgttggttgtgatttttatgcgggcgtttcgcggttaggcgtgtgtgtttcgatcggttaaggtaggtcgggcggaggatttggtttatcggagaggttacgtcgggggttgaggcggtttagagggttattaattaaatttttcggcggggcgggttcgggggcggggcgtttttttggtttcgtttttcggtttattgttttacgttgtttttttcgaggcgtttcgttgagggcggcgtgtggagagtttggggtgtttgtcgtcggttgcggtggggtcgggttggaggtcgcgggtgaggtttgtggttaatttcgcgttgtcgaggttttattttttcgagtttagtttgattttaggtcgtttttaggtcggtgtttagttgaggcgggaacgttgtagtttggttgagcgtgatttttaggttttgtgaggaaaagtcgagcgcgttatatcgaggcgttagtcgtttattttattataaggtaaaagatttatgttgttttagttattttaaagttgggagatatattgtattttttattagatttcgaatgtttttagtgtttgtaattttttaagaagtttttagagtagatagtttttggatcgtgggtattttttttcggggacggggattttgttgatcgttttcgttgttttcgcgggggttatcgttttttaattatttgggcgaaatatttttttttggttttgtatttgtggatttacgggaagcgtgatttgtagcgaggtaggattcgattttaggtttttttagaaagcggacgttgcgttttaaggtttgtttagagtcgttttaggaagtcgtgggttttcgatcgttttaaatcgtagcggtttttgtaggttttggattcgtcgttttcg

SEQ ID NO: 790 - DNA, 1247 bp, Artificial Sequence
  Description of Artificial Sequence: Synthetic polynucleotide
tcgtggggtattacgcgcggatttttgtttggcggtttttgcgttcggggttgttgagttcggggttcgttttgaggtcgcggttgtggtttttggttttttcggttcgcgttattgtcgcgcggcgttcgttgtattttgttttttttgcggtttcgtatgtttttggtggaatttagttcggcggacgacgaggaggatgagatggaagtttgttggaaatcgggtaaattttatagaaaattgatgaggaagacggtcgagagtaggattttgggagtatttatggcgggtaagtggttgcgtttttttaggaggcggtggcggcggcgtaggacgcgcggggtacggagcggttggatagcggtcggggttcggtttttcgggcggattcggagtgcgaggagtcgggttttagttatataaatttcggtttcgttacgttttttttcgtttttcgtcgggaggggaggaatggggagggagggtagaggaggggtggggagggtgggaggagagtcgggtggtgcgggtcggaggtgtgggggagaggggtcgcggtgcgtcggtgtggtaggaagacgtagcgttttcgcgggacgcgcgcggggttgtcgggcggtgcgcgcggcgcgggtcgtaagcgttgatcgggggaaggcgggcgttgtcggttcgtggtcggggagtaaaggttggttcgtcgcgttagggtttttttcgaattttcggaggtgtggttttttcgtagcgcggtttcggttttcggttttcgttagtcgtttttatttttttgggagcgagcggtttcggaggagggaagcggcggcggcgtttttaagagatagtttggagtaggcgtttttgttgtaggttgcgtgttgtttcggggcggtggtatttttttttttcggttttaatcgttaggtttgtcgtttgcgttttttaggggttagttcggagttagagaagtttcgttttgggttaggcgtagggtttagttcggaatagttttattttttcggttgggtatcgttttttataaagataggcgtttattttcgattttcgaggttaggtaaaggttacgagtttttagagtttggatcgatgttaaaagttgttgcgtttttttgtaggttttagttttttttttcgtagtttttaattttttttgacgtagattttagttgttttattttttcgtttgttttcgggattttttttttttcgcggtttgtttttcg

SEQ ID NO: 791 - DNA, 1861 bp, Artificial Sequence
  Description of Artificial Sequence: Synthetic polynucleotide
tcggtgagtagagtcggcgtagttatagcgcggagtcgcggcgtttattggttttcggagttgttaatcggcgtgtaattttgtaggaatttttttcgggtttatttgggagttatattgtcgttttttttttttagtcgtttaggggagttcggagaagtaggtttaggagggagggagttagaggaaaagaagaggaggagaaggaggaggattcggggagggaggcgcggcgcgggaggaggaggggcgtagtcgcggagttagtggtttcgtttggacgcgttgttttttagatattttcggagttttagtcgcgcggatcgcgcgttttcgtcgttttgtttttaaatttttgtcgtagtttttttttaagttagcgaatttattttttaaaattagaaattgaatttcggtacgggaaaggagttcgcggaggagtaaaattatagtagagtaagaagagttttagagagtagttttttcggagtattaatttcgtgtcgggagtgtagaaattaataagtgagagggcgtcgcgttttcggggcgtagttgcgggcggcgggagtaggcgtaggaggaggaagcgagcgttttcgagtttcgagttcgagttttcgagtttgagtcgtaatcgttgcggtattttgtttcggattcgtgtgcgcgggttgcgtcgagcgttgggtaggaggtttcgttttgttttggttgtaagtagcggttgggagtagtcggtttttggggaatatgcggcgcgcgtggattttgtttattttgggtttggtggtttgcgtgtcggcggagtcggtgagtgggttaggcggaggatgcgcgcgtcgtttagggtgtttgaagttacgagaggagttcgtagggaataggggagcgttatttggggaatttttagtttttaagtatatatcggagattcgttgggataaatgcgttcgttcggttattttttttttttttttttttttttagaaaagcgttgttcgttggcgttatttcgcggttcgcgggaatgggggtatcgagaattgcggtttggtttagtcgtagaggtttttgaagttatttttaattttttcgttttcggcgggttttgttgcgtggtttgggaaggacggaggggaaagggtggtaggaggggggagtttgggtcgggttcgcgagggaacggttttatttcgcgcgtttttcgagattagggatgatttggaaatttcggggttttttttttcgtatattatttttttcgcgttagtttttttgtttgattgtatgtaagttttggggagatgggggttagatttaagagattcgcgagtgtttagagagaaaagtttgtaaaagtttttttgtttgatgttttttgcggttagggcgaggtaatcgatattacgtggaatcgtagtaggcgattttttaaggggatattgggggaggtacggaacgcgttcgaaaatgttgggacgtcggttattggatttttagttttgcggcgatttttttttcgttgaggggtggaggttgtatcgcggggcgttagggacgggaggatatttttataggagttatacgggagtgtcgtaagtagggcgaggcggggtacgtgtgatacggcgttcggtttcgggtcgtttggtcgttgggggatagaggtttttttttcgttacgttcgttttttttggttttggcggggcgtttttggggtcgggaggagtttcgttttcggcggagcgtttgtcggtatttagtttttttttttcgttttggcggtgggaatttgatttttttttttggtcgcgtttcgggggttggagtttgtttttttacgtcgtttaatgagcg

SEQ ID NO: 792 - DNA, 3378 bp, Artificial Sequence
  Description of Artificial Sequence: Synthetic polynucleotide
gcgagcgcggagtcggagagtcgggagtataggcggtcgcgtcgcgttttggttcggttcgggttcgcgcgttagtatcgttcgtagcgcgggtattcggatttttcgggcgttcggggggttttagtaggcgcgggggaacgggagggggtttgcgtgcgtcggcgggtgttttttagggggcgtttcggcgaggtttagagcgggtcgggggcggcggcggttggaggagttttttttattttcggtcgggcgttcggtttagtcgtcggcgacgcgaggcgttcgcggggatttgtaattcgtcggatcgagttttcgtcggcggggtcgttgttgttggggaaggtaaggaaggtttcggcggggggttgggggcgcggcgggtgggggcgtagcgagggtgggagggggtcgggggaggggcgggcgtttagattttttaatttcgtcgtttggggtttcgtagtttcgaggttttgcgtttagagtttaggagtttggatttttattttttatttttttagttttttgttttttttagcggtggcgatggaatgtggtaggttttcgcgagttcgtattgggtaggttgaggagggggcgattttggacgtaggagaggtttttcggcgtcgtcgttttttttttatttatatattatagtttggtatttttttttattatatgtatagggtaggttggggagggcgttttcgttgtatttttagtatatatagacgttggcgggggtttaagggagttttttatggtttttaatagttatatatagacgtagtaggtttcggagagttttcgagcgtgttttttttttgttaattacgtttagggttttttatagatattgtaagggttcgagacgttttttttttacgtatagagttcggggtaggtaggagaaaattttagattttttttcgaagttttcgttcgtagaagttttcgtttgtagatttggtattggtagtggagattttttggaggtatttttttttatttcgggcggagggttatttttgcgttttttatttttacgcgaacgtttggtttttttttttttgtttatttttttattgggtcggataggtcgcgcggataagtcgtttttaattttgggtcggttttatgtcgttttcgttttaagcgtcgagtattttcgggcgtcgagtattttcgggttcgcgtcgtcggtgagtagaggtcgtcggttttttatcgtcgtcgcgttagtttggagtcgcgcggagttgtttcgaggaacgagtacggttttcgtttttttttggggaggttgggagttttggattcggttaggagttttttttttaggttttcgcggttttttgggcgaggtagagagttttttcggtttcgggagggggcggcggagttgagaattatcgcgaagcgatgcgatcgggagggtttgacggaggttgcggtttcgagttcgcgtttttttttttggtcgcggcggtttttgtttggttatttttcggtagtttgaagagaacgtttaatttggtattttagttttaggtcgttgggtattttatttttttttatttttattttgggtttttaagttttttggagcgtaggcgtttaggttgggattcgaagagttttaagttagtttttttttagtattcgttttcgtcgcgattttttcgtttttttttcgggtttggggcgtagatttttgggttgtaatttcggagtagttgaaaggtaggaaggcgtgtgggcgggtagggggtttgtattttcgttttagaggagtcgtttgtcgtttgtgttggggagggagttgggaggtttgttttttcgttttattttgggaatttacggagattttcggtattttttttatagatataaatatacgttttttcggagcgagagtcgtcgcgggggaatagtagaggtcgcgcgggcggaggcgggggaaaggggagttgggttttttttttatttgggagggaggtggtatacggtgtgtggggtttggggaggcgattgttacgttttttagaatttttatgttttttattcgtttgcgatttcggttgtcgaggaggtaacgagggaggtcgagtcgttttttttcgtgggcggtagcgaaattttgcgttcgtacgtcggggtgtcgtcgagttcggttttgagtatttagtaaggttaagtaggcgaaggagggggcgggggtttttgggcgcgttttcgttcgcgtatagtcggggttttggaagggggtgtgcgtagttcgtcgagttagtttcgttcgtttgtcgttcgcgttcggttttcggaggcggacgttgcgcgcgttcggggatttcggagcgttcggcgttttacgtttttttttcggttcgttagttgttttttggcgttgtttttagatttgttgcgtttcgatttggggggtagaaggttggttcgggagattcggcggttgagggtcgagtcgcgaagtttagggatgcgttagagaggcgcgcggtttcgcgggtgggcgttgcgttggggggttcgagtttggggtttgtcgttttcgattttagggacgggcgtttgtttttgtcggggtttcgcgtaggggcggatagagggcgattcgtcgtttcggttttaggtagtatttattcggatttcgggttagggagggggcgtagttaagttgtggagttttcggaggtttttttttttttcgtaggtttcggtttttttcggatttcggtggtcgcgttcgtgaaatggggacgcgggttttgttttcggattttttttagttttcgatttttcgtatttgtttcgagatttaacgtgttcggttcgtagcgtgttgggtttgcggcgttagggtggttcgagtttcgagattatttgcgtttgcggatatagtcgcggggtttggtatgaagggttttagggagggtttagtaagcgttcggggttcgagtagttttttgcggcgtttttcgttttcggtcggttcgatttcgttttcgggagtgggtcgtggggcgcggagttcgtttttcggggacgtcgcggggttttaggtttaggcggtcggcgcggggtcgtagtggcggaaggcggagggtcggcgcgttgtcgttgattgtcgggagagggcgttcgtatcgcgttcgcgcggttttgttcgtttttttcgtttttttcgcgtttggttcgcggtttcggttttattttgggtagtttcggtcgttatttttttttcgttcgttcgttcgttcgttcgttcgttcgttcgtcgttcgttttcgtcgtcgggtttcgtgacgcgtttcgcgtttcggtcggagtttttttcgtcggttcggttcg

SEQ ID NO: 793 - DNA, 1646 bp, Artificial Sequence
  Description of Artificial Sequence: Synthetic polynucleotide
tcgttattagtttacgcgcgtagtgggcgtatacgtggtgatttgtttgcggttgggtttttagtttcggttttttttttttttagttttcgttcggttttttgtagtattacgtgtagttgcgttgggtgtaggatggcggcggtcgcggcggcggtagtagcggtgggtgttaggtttcgggattgttgtagtcgaggcgttgtgtttttgttttttttttttttgttttttcggttttcggtcgtcgtcgtttggttgttgggtttgcggttcgaggatattgttggaggtcgcgtgtttttggaggggggtattttgcgcgtcgtcgaaggtattagtttttttttgcgtgtttatttttagttaggatcgtcggttatcgtcgtatcggtgtttttatcgatttttaattcgggggagaatggtatcggcgattgggtttcgcggttcgtgtttatcgaggagttttcgggcggtggcggcgtggtttttagcgcggtttttattcgtttttcgggatcgtagcgttgtagggagtagagcgattgggtatcggacgtggaagttttggggtttttgcgtttcgggggcgtggtaggttcggttttggtttaggtgcgagtgcgggagttgcgtaagggcgaagcggagcggggcggcgcgggcggtggcgggaagttttttttattttgcgtttgggatgggcgcgcgtggtattattacggcgtcgtcggcggttttttgttgcgcgttcgttcgcggttgtacggtttaggcggggatttgttgttttttgcgtggttgcgggcgttcggggcgtttttgttgttagttttgtcggttttgtttagcggtttgcgtttgagtttgttgtcgttggattcggtggagttacgggtgttgcggaatagcggttcggtcgtcgagtaggagtaggcgcgtcgcgtgtaggtcgttcgcggtagggggatttatttgttttgtattttatttttgggttaagtcggagttaacgcggttttggttggttggttgtatatttcgttgtcgtcgggtttcgggggtatcggggaagattatagcgaagaggggatttatttttcgtggttgtcggcgttcgtgtgtatcggcgcggtatttttgggcgtcgaaatttgtttttatttagtgtgttcgcggtacgggttggttatcgtttcgtatagcgtgtgtttgattcggtttttgatggtagtcgtttttttcgtgtgttattcgttgggtcgtttgttggattgggcgttgcgttaggagataagtattttttatacgcgggagaagttgttggagacgttgcgggtcgtagatttttatagtgatttggtgaaggaggagtttaatattatatagggtgttttggagttgcgtattaaagttgtggaggaggtgttgatttttttgggagattgttttatgttgcgtttagacgcggtgttcgatttcgttattgttttcgagattttgcgtagcggttatattcgtattttagtgtacgagggtgattagcggtataatattgtggatattttatttgttaaggatttggttttcgtggatttcgacgattgtatttcgttttttattgttattcgtttttataatcg

SEQ ID NO: 794 - DNA, 3723 bp, Artificial Sequence
  Description of Artificial Sequence: Synthetic polynucleotide
gcgttcgagggtcgggacgtacgtacgggtcgggtaggatggcgttggcgtcgatgttcgcgcgttttagggtttggtttggtcgtttttttatttttgtcggtttttcgggtcgcggatttcgcgcggcgtcgggcgatgttggtttgttcgtggttattatttcgttttattttcgtttttttgggtcgtcgtattcgtttacgtgttcgtttttttttgcgtaaaattttaagatgagtaaatattgggtttacggtggagcgtcgcgggggtttttttgagtcggggcgggtcgggggcgggattagggttcggtcggggcgtgttcgaggggagggatttttcggtttgcgattcggcgttgttcgcggtgtttagcgttcgttcgggcgcgttatggggaatcgtagtatcgcggacgcggacgggttgttggttgggcgcgggtcggtcgcgggggtatttgcgggggtatttgcggggttggttgggtagggcgcggcggcgttggtggggggcgtgttgtttatcggcgcggtgttcgcggggaattcgttcgtgtgcgtgagcgtggttatcgagcgcgttttgtagacgtttattaatttttttatcgtgagtttggcggtcgtcgatttttttttcgtttttttggtgttgtcgtttttcgtttatttcgaggtgagtcgcgttcggtcgtacgagtatttttatttgtttttcggtttttcgtttttgtttttacggaggattcggcgcgattcggtttttttttggtgcggagtttttagttggggcggcggtaggggcgttgcgttttgtttttcggcgatatatttatcgtcgttatttcgcgattttttattcgttgcgttgtttgtttttcgattttcgtttttttttttttttttcgtttgttttggcgtttgttatttaggagatgttcgtttttttatttagggatttcggaaataggcgattttgttaagtttagtttttttcgtagttggattttatttttagggtagttagttggatagataggtagatgtaggtttagttttttggttgtcgtgggatatatatatatatatattgttatagttattgtttattatatatatttagtgtagatgttggtatatttttagaaggaggtttatagttcgtaggggagatttgggttggataaaatttaggggaggggagggtgtgtggggattaggtttttgttgagaattttggggggaagtttgagggggaattgggggatggagtttatattttatattaggtttggttttcgagtgggtcggttttggtgttagtttttttgcggttagagaaaagtagtttagggttgagttggagacgcggtgttttcgattgtgggggagggggattcgaggtttttttttgatggatatagtgaatttaggcggttggggtagagattagtagtacgggatacgcgtgatttgtgtttttttcgagtcgtagacgttatagtgacgacgtttaagtttttaatttttttaaatcggcgggaaggattagaggggttgtttgtttttttgtttttggagagagttattttacgtggagttttacgttgggtattgggtacggtttttatatttttaattataatttatttttaagataattatgatgtggatattattattatttttgttttatagatgaagaaatagaaatgaattaacgtgttcgagttttttatagagaatttagttaatagagtagttagtttcgtttttaggtttagcggggattttgtttattttaggttggggaggggttttttttgagttcgatgatattaggttcgtttttagggaattttttaggtcgtttttatgtttgtaataaaagggagattaaggttagaagtcgtgatttacgtttgtaattttaggattttgggaggtaaaggtaggaggatagtttgagattagtttgggaaatatattaggtttggtttttataaaaaattttaaaatattagtcgggggtggtggttgcggttgttgttttagttattcgggggagttgaggcggtagaatcgtttaaatttgggaggcggaggttgtagtgagttgagattttattattgtattttagtttgggtaataagagcgaaatttcgttttaaaaaataaaaagaaaaataaattagtcgggggtggtggcgcgcggttgtaattttagttattttggagattgaggtgggaggatcgtttgagtttaggaattttaggttatagtgagttatgatggagttatagtattttagtcgcggtgatatagcgagattttaatttaaaataaagggagatttgcgtggggaaggggtgtttttttgttcggttttttggtttttggtttatagtcgggttttttttttcgtatttagttttggaattatttataagagtgggggcgggttataagggttcgcggtggttgggaaattttagggtttgtggtgtcgtcgcgtaggtttagggtggcgcgtggttgttgagttttcgtttgtgcgacgtttttatggttatggacgttatgttgtgtatcgtttttatttttaatttgtgcgttattagcgtggataggtgcgtcgtttttttcgttcgcgtttcggcgttttcgcgtttcgttcgtcgtttttatcgcggtttgtgcgttgttcggcgttttttcggcgtttttcgtaggttcgtggtcgtggtcgtgtcgttgcgttataatcggtagggtgggagtcgtcggtagttgttgtttatcggcgttacgtggttgttgttcgcggcggtggcggcgttcgtattgtgcggttttaacgacgtgcgcggtcgcgatttcgtcgtgtgtcgtttggaggatcgcgattacgtggtttattcgttcgtgtgttttttttttttattttgttcgtttatgttgttgttttattgggttacgtttcgcggtttgtagcgttgggaggtggtacgtcgcgttaagttgtacggtcgcgcgtttcgtcgatttagcggttttggttcgtttttttttacgttattcgcgtttcgttttttttaggatttttgcggtttcgattgtgcgtttttcgcgttcggtttttttcggggtttttgcggtttcgattgtgcgttcgtcgcgtttagttttttttaggatttttgcggtttcgattgtgcgtttttcgcgttcggttttttttcggatttttgcggttttaattgtgtttttttcgacgtcgttagagtcgtcgcgtttttattttagattttatcgtagattcgtaggaggcggcgtgttaagattatcggtcgggagcgtaaggttatgagggttttgtcggtggtggtcggtgggtttttgttttgaggggcggggaggagaggagggggggggtacgaggtcggttgggcggggggcgttaacgcggttttcggcgtttttaggggtttttttgttgtgttggacgttttttttcgtggtgtatattacgtaggcgttgtgttttgtttgtttcgtgttttcgcggttggttagcgtcgttatttggttgggttacgttaatagcgtttttaatttcgttatttatattgtttttaacgtcgagtttcgtaacgtttttcgtaaggttttgcgtgtttgttgttgagtcgggtattttcggacgtttttcg

SEQ ID NO: 795 - DNA, 554 bp, Artificial Sequence
  Description of Artificial Sequence: Synthetic polynucleotide
tcgttaaaggcgtagtatttcggatattttcgggtttatcgtcgtttttttcgttttttgttgtttttaaagttttattatatttttgggtcgggcggtaggagtggggacgggagtggaggttttgcggagtagcggttcggggagttgtgggttgcgggttgggcggggcggcgcgatgcggggcgggcggtttagtttcgttttttttatcggcgtttttaggggatgaatgttttttttgacggtttttttatttattgatggattaattttgttcgttaattttttagttttcgttaaaaatgaaaaggagtcgtttgtgtttgtataaatttaagagttaggatggatgtgcgggggtggggcgggcggcgttttcgtattggttatcggtttagttacgtttatggaggggagcgggtagaggggagggggcgcggtgtttagagtgggggttttatttttagtttgcgcgtgtgtgtttgcggtgttttatgcgggaggtagggcgtgtgtgtgtgtgtgcgcgtgtgtgtagttgttcgcgtgcg

SEQ ID NO: 796 - DNA, 1101 bp, Artificial Sequence
  Description of Artificial Sequence: Synthetic polynucleotide
gcgttaagtcggttttttaatttggtttgttgaacgtaaatcgttgagagtttgttgtatcgttttttggggtttttggttgtcgagtttcgttaaggtaaagacgttagtaagcgaggaagcgtagcggaagaaaaataagcgggcgcgcgaggggagttttaggagggttgtcgagtggttggtaggcggttttcgtttttttcgggtggtttcgtcggcggttgacggttcggaggacgcgcgtttcgaaaagttagatttcgggcggcggcgcgttacgtcgcgttttttcgcgtttttttttcgttgcgtttcgggaaaggaatttgttttttcggttttaggattggggagtgtgtcgcggggtcgagggtggggaatagttagagggagacgcgaattaggtcgttggcggagggtttagggggagcgtagaggcgacggtttttatgtcggcggttaatatgatggagaatcggtcgttgttcgttttgtaggtgttcgagtcgtagggtgcgttcgagggtagttcggtttggtttagttcgtcgatttttacgtttcgtcgtcggcgttttaagatgcgtcgtatgaagaacgtataggagtagagtttggaggtcgggttggttcgggatttgttcgtcgttttggttttcggtaaggagtttttgtagttgtcgtttatcgagattacgttttttagcgacgaggatatttcgtggtttaattgttttatatttagcgcgttttcgcgtcgaaaacgttttttttttcgtaagtggttgagggtgagggagcggaaggagtgtagtgaaagtaggtacgttttcgtttcgttcgttttttttttttttttttcgttttttttagagtcgtttagggtttcggggtattttgggggaaacgttttgggggagaataggagttcgttattagaggcgtttttggagggcgttgcgtttggttttagggatggtggtatttagtttttacgcgtgttattcgttttttaatttagggtgaggggttttatgttgtacgatacgtttacgtggggttttacgttgtattttattttttttgattttcgtagcg

SEQ ID NO: 797 - DNA, 548 bp, Artificial Sequence
  Description of Artificial Sequence: Synthetic polynucleotide
gcgtaggcgtttgttattatcgttagtgtgttttgattaagcgttttttgttgtttttacgttcgggtagtagtagtagtagtcgcgaaagggtagggtttaggtggttgtgacggaggtcgaagaggagttgttggtagagaagtagttttttgtttaggttgggattcggagttgggttttgggggtcgtcgttttgtaggttggtaaggagagattcgtgagcgtttgtgtgtttgttagggaaatagtacgggatataggcgcgcgggtgcgggtgcgcgtgtatatgcgtatgtgtgtgtgcgcgcgcgcgtgtgtgtatgtgtgagggtgtgacggaggcgtttacgtgttcggttcgttcgtgttacggtcgtttatcggttgtagaggagaagggtaggttgtgggcggcggcggggcgcggaggggtagttaggagcgtaggttgggtttcgtatttttttgttttaaaatttattgatgtagcggttattgcggttgtcgagcggcgtttttttagagttcggggttgtgttcgttcg

SEQ ID NO: 798 - DNA, 1153 bp, Artificial Sequence
  Description of Artificial Sequence: Synthetic polynucleotide
tcgtttttttcgtagagatcgttagttgaggttgtaatatttgtttcggtaaagcgttttcgtagttttttcggtttgttcgattcggtttttttcgtttttgtttcggttgcggtattattttttggagttacgtttcggcgagcgggggtcgcggagcgagggggtcgttgtgtcgttatttattcgagtcgttcgggttggtcgcgagtcgggattcgcgagggttggcgggttttggttttcgaggacgtagatatgtggtttgaattttcgtttttttagtcgttgtttttgtgtatttttttgggcgtttttagcgaatgcgagcggcgaggcgagggcgagcgcgtcgaggaagggcgggagaggcgcggagtttggtcgcgtcgcgttgcgtcgagcgtcgggtttttttcgcgagtttttcgggttcgcgcgcgcgttttttattgttttcgtttttcgcgcggcgcgtgttttttatttttcgtcgcgcgttttcgtattcgttcggttttacgcggcgcgcgtttgttttggcggtagcggcggcggcggcggcgcgttttttttcgaacgtcgtttttagggttgttggttgcgttttttattgtttcgcggttgttgttcggggtgggcggcgaggcgggggggaggtgtcggtttggtcgtcggggagggtttatcgttcgggcggatttttattgcgagagcgatgcgggtttaggcgcggcgcgcgggggttgtagggcgtttagtattgggggttgtcggcgcgcgggggtttttttttggtttttaggtattcgttgttgttgggcgtttttcgtattttcggttattatggatatttcgttttttcgtcgtttttttcgcgtatttcgggaggtcgtcggggcggtagtagcggcgcggtttcgcgggtgtttaggtgatcggttcggtagcggtagagtagtggtagtagtcgttattgtcgttgttattgcggtcgtcgtcgttggagagaggaggacgaggagggtaaggggtagaagtaggttttgttttgtttgttttagaggttatttcgggtttttttttattaattaagcgatttcgtgtttatttcgtaggagacgtttcggtagtttttaatttgtgtgcgtcg

SEQ ID NO: 799 - DNA, 1146 bp, Artificial Sequence
  Description of Artificial Sequence: Synthetic polynucleotide
tcgggagggtttggtcgaggatttggggcgtttcgagattcgcgtgttagcgtcggtggcgtttagggtcgagatttgttttttttttttttttttttttcgtttttttttttttttttttcggagtacggtcgaggtttttttttattcgcgagatttcggcggtcgttagtcggtttttgcgttcgttcgtcggtcgggtagtttgtttacgcgcggaaagttcggcgcggcggtcgaggggtttgggagggaacgggcgcggaggcgggatcgcggtttttttttatttcggggggagtttaggaggcggcggtgttggagcgcgagtcggagtcggagtcggagacgaagagaggcggtgagaacgcgggtgtttagggattttattttcggttttcgttgggggttcgcgagcggttcggggacgtttgggttggggaagcggggttgttatttttagggcgggaggtagagacgatttagtttttggtttcgtttttttcgcgacgcgattttcgaggggttttgggtcgcgtttgtagcgtcgcgtattttcgtgtttttcggcgtattttagcgtattcggtattttttcggtagggcgagggtttcgggggaagggaaggtttcgggagttaaggagggcgttttttaggcggagagtttcggaaaatcgcgttttcggtttttgttttttttttaggtttgttttaagggaaagcgggcggggcgatttcgtacgttttttttgttgttttttttcggttttttattgtttttagtcgaatgtttttttgggaaggggggagggggtgttgcgttttttttttaaagggttttttttttttttgttttttggtaggtcgcgagtacgagtggggtggggcgtgtttacgggttttcgtttttttcgtttttttcgttttttagtttagtttcggagtcgtagtttaggcgcgtcgttcgagggtttacgtcgtatttttttttcgtgcgttttgcggttatttaggttttttaggatatcgtggagagggaataagggggtagggacgtttttttcggtaggagtcgtcggagaagggggtttagatcggagggaggcgagaagttttattgaagtcgggcgtagggtttgggacg

SEQ ID NO: 800 - DNA, 961 bp, Artificial Sequence
  Description of Artificial Sequence: Synthetic polynucleotide
tcgtttttttcgatatttaaaagtttcggttttgcgtaatattgcggattttttttagtttttcgttcgttttttttttcgcggggtttcgtttagggtcggtttttcgtttttacgtcgtagttcgggttagcggggttcgtcgcggtggcgttcgcggatgttgtcgtattggtcgttgcggtacggacggcgtagtttcgggcgcggttcggtataggcgtcggcggttttcgttagttagtagttcggcgaggcgttggtttatttatggttttcgggcggcggtttttgcgtttagttttgcgcgtagttttcgtttttcgttcggggtcgtcgagttttcgatacgggcgagatgttgaacggcgtaggtttggataaagtttttaagatgtttttgtcgcggaggtcgaggattcgttcgttcgtgggtgagttgggaggggcgcggcgagggagggtgggttcggggcgggggcggcgcggggcgcgtttgcggttatgcgatattgtttcgttcgcgtttcgtttttttttttgggttttttgggttttttgggttgtaggattcgtcgacgcggcgcgttggtcgtacgggggttgggcgtcgttgtatttgcggggttaaaaggttttaggtcggggcgaggtgagcggcgggcgttagagattttcggttcgtttttgtatagatgtgtgtgtgtgtgtgcggtttttttgtgcgcgtgttcgtgcgtttttacgcgcggatgcggtttagggatgcgatttaggcggtagttatcgcgatggtgggtacggtttggcggcgtagagaagatgtagttttttttgtcggcggtcggtatcgttgtgttgtagagtttaaaagtagagggggaaaaaggtattcgaagggtttttcgagtgatttttattatttggagtttcgggttttcgcgcgtttatagcggcgacg

SEQ ID NO: 801 - DNA, 1040 bp, Artificial Sequence
  Description of Artificial Sequence: Synthetic polynucleotide
tcgtttatacgcgggcgtaggagttcgttttatatatttttttttttcggttttcggggtattttagtattttgatatcggtagcggggtgtatttttgtagtcgttatttaaggaagacgtaggaggtataaggcggggtggaggcgtcgcgtagggacggaggtttattcgtttagatgtggggagattcgcgggaggggatttcgttcggttcggtgagtttcgttgggagagtggtgtgcggcgttggttggtaataggcgtttacggtcgagagagaggtagaggggttgtgttattcgtcgtcgcgtttcgtttttttggcgtatatttggtaggcgttttagcgtttcggtagcggttagttttttttttttcggggtcggttttgtcgcgtgatttttttttcgtcgaggtagtttttattcgtattttcgggcgttcgtgtagtttttatttggtaaataggacggtgtcgtgttttagcgggttgcggtttattgttcgttagttttgtcggattagttcgggtttcgggcgttttatgttgtttcggggacgcggagcgcggggttgggatttttagggttcgggtgtcgttatcgtacgtgtcgcgttatttttttcgcgacgcggtttttttcgtttttcgtacgtttttcgtgttttcgttcggcgggggtcgtagtcgttttttttttggcgcgggagagaaaaggcgcgcggttagtcgtaggtggagatattttagttgtgttttcggggatttcgtttggtcgttgcgttttgcgtttcgtagtcgttagagtcgttttatttcgcgacgtttgggttgggcgttttaaagtcgttacggttttcgttttttttaggttagtaaggcgcgcgtttttttcgttagtcgttatggtggtttgggaaaggttcggtttgtagaacgtaattgatatcgcggaggttttttgggttttagttttttttttcgagtttcgagggtattgtgttgaatttggtcgttttaggtaggcgttgtatgcg

SEQ ID NO: 802 - DNA, 1497 bp, Artificial Sequence
  Description of Artificial Sequence: Synthetic polynucleotide
gcggttttattcgcgggttttcgggttgggattcggggtgttattcgtagtgttgagcgtttgtgttttgagatttcgttgtttttaagggtttttttatttttcgggtttcggttttcggtttcgtttggtatgaggagcggggagcgtatagtagggtgggggtatcgggcgtacgcggggaatttttttacgattacggttacgttaaatgtttgaatttttacggttgtcggtaatagcgagcgtagggagggggttgtgcgcgcgggggttttggtggcggagtaggtattatttcgagagcgtcgaggtttgtggtcgtaatttcgggagtatcgttgcgggaggagcggcgtggtcgggtagaggcgattttttcgtaggtagtatcgggtttcgcggtcgttttcgggtttgttttggtgtttcgggtttttattcggcgggttggcgtgcgggggttggttttcgtcgagattttgttgggagcgggttttggttttacggtgagttcggttttagtttcggtgatgcgtttcgttgtcgcgcggggagggagagttcggtagggttacgaggcgtcggtttcggggtcgtttgaaattcgaagagatttcgttcgttcgcgcgttcgtcggacgaattttcgcggaggtttcggggcgtagtcggcgtgagggtggggttttatcgtaggggcgtcgggagttttttcgtttcgttagtttaattaaggatcgtttagaggggtttttattttgaatttcggtttttttaaaggaagggtagattttagatttttttttttttttttcgaacgtgttttgggtgtttttttgtttttttttttggtaagttaggatagcgtatagtgtacggagtttcgaagtttttttagttattttcggatttttggttaaatttgagggtgagttcgaaagatcgttgtcgtcggcggttattttagcgcgggttcgttgagaatggaaatagtaagtgcgcgtcggttaggtcgttattttttttttttttaatagttcgggtagtcgtaggggttagtttcgggttagttagggtttagtataaaatgttttttagcgatagtagcgtcggaagttttttttgaggtcgtggataagttttcgcgtaggggtttcgcgtttagtttatttcgtatgttttcgcgttagggtttgttggtgggtggtcgtttgtttcgggttatttcgggttgggtattggcgtcgatttcgtttcgtttgtggagttgtatttggggggaaagatggatcggtagcgtgggacgtagagttaggttaggtcgtacgggttgtgtataaagatatgttcgataggcggggagaaggtatggtttatcggtttaggagaaagttttggaggggaggtagttcgtttttggggataacgcggggggtcgtattcggatattattagaagtttttgtcggagacgttaagggtgtttacggtgtcg

SEQ ID NO: 803 - DNA, 1845 bp, Artificial Sequence
  Description of Artificial Sequence: Synthetic polynucleotide
tcgagcggcggggcgtagggtgcgagcgggaggttggtgttttgttcgcgatgggtaggggagtcgggtggtcgcggggcgaggagtcgcgagggtcgggtcggcgtgatattatttggcggagtttcggggaagagttttaaaggcgcgcgttttttcgtgtttcgcgtattcgaacgggagtcgcggagagttcgtttttcgttgtcgtcggcgtttcggggaggtaagtgttattcgcggatttcgagtcgcggtcgggtgggggcggttcgcggttgtttcgcgttcgggaagttttggttggggttgcggtcggagggcggcgtttaagtttttttgaaggtttcggagggtagttggagcggcgtagagtttgcgcggggatggcgggggtggtcgcgggtcggggtcgtttgggggcggttatttcgggcggtgcgtggaaaagtaggtattggtgcgcggcgaggggcgtacgttagagttttagtttcgcgttttgcgtatttggcgcgttttggtcgcggtttcggcgagttttagtttgtttcgggtcgcgatttcggtttcgcgtttttttgttcgttcgggttttttgtagttcgttggtttcgcggtcgcgtacggttacgtcggtaggtcgcgttcggcggtcggttaagttagtttcggttttgtcgcgttcgcgtttcgggttatttcgttcggttttttcggcgttgtatttttcgttttttttatttttagtcgttcgttatttttatatttttcggtgtttcggtttcggcgtttgatttagtgtttagtaattaatttggcgttttagaatggttagcgggttggataatgggtgtatttatttttcgggttaatttgaatagaggtgggaagaaaggtttttatagatagaaaatgttattcgtcgagcgtttaaaggggttgttatttttagaataaatcgtcgtcgcgttcgtcggtttttttggttatttttatatagtttcggttcgcgtcgcggattcgtcggtttcggtttcggttttcgggaattatttattcgagtgttttcgacgggaaagtcgggcgagagttggatttaggcgggggtcgagggaaacggggaaattggagattcgggtgaaggtcgtaggggataaagagattgattagaaaattaaacgcgtatttagaaggaggcgtaggcgattgtttaaggcgcggacggcggagttggggttcgggagcgttcgtttaaaattttcgaggttcgttaaagaggagggttcgcggtttagatttttcggagcgtgttcgaggcgatacggtaagtttttggggtttttaaattgtgaatggagtttaatgtataagtatagatagtagaaatagggtcgatttgtatagattttttatttcgagttttttgtgttattagtttcgtcgttttcgcggtttggaaggtgatacggtgtttttttcggttttttgttcgttatttttgttgggattttcgggttcgtttggggatatttgttgagcgggtgacggaggttttattttttgattttttttggattcggtgacgcgttaagtgttgggtacgtacggtttacggagtttgaatgttggggtttttttgttgcggtatttttagtttattggtgtagcgggatcgtgcgttttcgtcgtagttttaatttagaggatcgcgtcgcgttagcgtttttagttaggttgtggcgtttttagtgggtagggttggttcggttttagttaggtgaagttttagattttggattttttcgttttcggggtttagcgtgtatttattttattcggtcg

SEQ ID NO: 804 - DNA, 408 bp, Artificial Sequence
  Description of Artificial Sequence: Synthetic polynucleotide
gcgttcggttgttaggtaattcggttttcggttttttacggcggttttttcggtgtgttttattaagagcgatagggttggtgattcgaggggcgcgtgcgcggtcgttagtttgggatttgtacggatttttttttttttagtacgttcgttcgggggttttttttttgttacgtcgttggggttcgttcgttatttatagttttcgtagagtttttcgggtatatcgcggttggtcgttcggggttaaggatggggcgggagcgtttatttattttcgcgtcggtcggggtatttaagaggcgcgttcgtagttatacggcgtttcgtttttcgtttcgaaaaagtttttgtttttttggcgcggtgtggcgttttcgttagtttagtcggatttttttcgtttcg

SEQ ID NO: 805 - DNA, 3276 bp, Artificial Sequence
  Description of Artificial Sequence: Synthetic polynucleotide
cggttgtattgttgcggggtgtaagggcgggggaaattatatcgttaggcgaggcgcggggatcgtgttggaaggttcgcggcgcggttttttttgggcgattgcgggggcggtttggtagggagttggggcgagtggtcgtcgcggggtttcgtaggcgcggggaggtatcggtcgggtattcgcgcggttgaggcgagggcgggggatgtttggtcgggtagggaacggggtgggggagggtagaggggcgagcgagtcggagggggaatcggagtcgagggcgcgcgcggatttcgaggttttttaggcgggttttgagcgattgtaaagtttgttcgagttggttgagcgtttcggcggtcggtgttcgggataggtcgtttatggtgtttttgttcgagtcgggttgtttgcggtcgtcgttcgttcgggtttcgtcggtttcggggtttagcgtgttttggttttcgtagcggtttagtttggcggttagttcgcggatggtttttttttggtttaggatggtttttttttgttgtagtatcgtttcgcggagttgtagtacgttgtttcggagtttttcggcgtcgtcggcggttacggacgcggcgtatatgtcggcgtttacgggtatcgaggtgtagatgaagcgcgtcggttcgaaattttgggtttcggcgtttaggaggtagagggcgagtagcgtataggtgcgcgcggcgcggtcggtcggtatggttgcgggtatcgggcgtttcgggttcggttcggttcggttggggttcggtttcggttgggattcggttcgggttgtggtttcgcgagcggttcgcgttttgggcgtcgcgtttttcggtcgcgcggtttatatcgtcgcgttattaggtttttattgtcgtttgcgttgcggagttcgcgttttttatgtcgtcgcgggaggggtttcgagtcgtcgacgttagcgggggaggaatttcgttttaattgttcgcggttcgggttcgcggcgcggcgggggttttacgagcgcgttatcggggttgttttcgttcgcgtttttttcgtttttttgggagttgtcgcggtttttttttttttcgttttcgtttgggtcggcgttgttgtttcgaaggtttcgagagtttagggggaaggaagtcgggtttcggtttcggattcgaggatggattatttgcgtggtgttttcgaattttcgacggggttttaggcgggcgggaaattatcgcgttcgggagatagaattcggttcggtttttttggttgtattgaatatttttgggtcggggtcgtttggagtcgggttgggtgtttaaggatttaggtcgttaatattcgagtgttcggtggttaacggttcggagtggggtttcgcggcgttattaagtttagagcgggggttatcgggtcgtttcgcgttttttagatgttcgtgtgttattgagaagtcgtcgggtagtttgggtatagggattttttacgggtcggggttttcggcgtttttttttttttagttttcgggttttgtggattcggtttcgttttcgggggattgttagtttttatttcgtgcgggcggggcgttggggatttttcggaggtagatttagttgatcgagttttttttgttcgcggcgtcggttcgatcgcgggtaggcggcgtcgtcggggttggacgttcgtagcggcgtttcggaagggggtttcgcgggagtagtcgttcgcgtttttagtagtttttttttgttaggcgtcgcgcgcgttcggtattttcgggtgtttatttgtgcgtggggggttgtttttcgtttgtttagtcgcgtttattttttaggtttaaaggttagtaggaagggtttcggaggtggttgggggcgtttatttgagaagtttcgttttcgtttagatattttattcggtattcgcgtattcgcgtttttatttggatcgcggggttcggttttcgagatcgcggttcgggtttcggcgtcgggttgggggtttaggattagggttggcgtagtcgtttcgtttcgtttcgtttcggggttattagagcggttaaagtttcggaaattttttcgtttacgttttcgtggtatagagaaggaaattgaggtttcgagattgcggggtcgggttatagtcgtggtttttcgattttttttcgtcgttttcggtttttttggtttttgcgttttgtagtttttttttgcgcgtagtcgggggttgggggtttttagttagtagggatttacgggtagtttcgggtgtcgggatcgggcgttcgtttttcgggcgggagtagaggtcggttcgatggagatttttttgagaaatggcggtttttattcgttttttagttttcgagcgttcgtcgtttgcgtttagtattttagtttttaagtttttttgagtcggggttgcgttttcgttgtttttttcggtcgtcgttttttggcgttagagggatttcgcggttcgtacgggtttgttttcggtttcgttcggagggtgtgcgggttttcgtttcgttggtttcgtttgtttattacggcgcgtttaaatttacgcggttcgcggttttttgcgtgttttgtcgatttcgggtcgtaggaggggttagtttcgtcggtttttacgcggggtttgcgtcggtagcgttacgggttggaacgcgtttcgggagaaattattcgcgcggggtcgcggcgttttttgttttaattttcgtagggagtcgttaggcgggtgtttttttggttttagcgttttggtttcgtcgttttttcgtacgcgtttagtggggaggtcgcgttcgttaggtttggagtcggatcgtgtttagtcgagagcgcgcgggcgcgggagaggagttttgttttgtttagggtaggttgtttagacggggcgggaatttttagtttggtttcgcgtttttatttttagtagtcgtggagtttttttagtcgtttaaggttagggattttgtttggttttttttttagggtagtagattttagcggtttggtatttcggtatagaggagcgtgtttttttttcgtagaggaagggagtggacggcgttagaaagggaggggagtttggggcggtgtttggggttagcgggatttttgggtattgtggggttttaggagaggagattttcgggtttagtttgtaattgttgtgtaggaggcgttgggcgggatatttgtaggcgttgtatatatacgcgagggttattatgtcgcg

SEQ ID NO: 806 - DNA, 1160 bp, Artificial Sequence
  Description of Artificial Sequence: Synthetic polynucleotide
gcgcgttcggtgttttaaggtttttaggcggagcgcgggcgcgaggtgcgggtttcggggcggagcgtacgttcgggaggcgggaagtgggtagtagcgttttcgtttggtttttgtgcgtttcgattcgacgttttttcgttcgattaggtgtttcgagagcgtatagttgggagggttttttcggtcgcggcgagatttacgtttgcggtgtgttagggcggcggcgacggtgacgggcgtggggcgcggcgttgtttcggttgtcgggtcgttgcggcgagcgcgcgggtcggtttggagttatcgggttgaatcgtcgcgtttgtatcgtgtcgtacgtcgcggaggcgttcgggtatagatcgcgcgggcgcgtataaagcggttcggggcggtcggcgcggcgtagattttcggtgggtagcgtattttagtttttttaggttagcggttgtagggagtttcggttcgcggttttttcgttttaagtttgggagttgtcggttttattttgtttttgtttatggggattcgagagttttttagcggcgtatttaggggtaagagtattgtcgtgtgagtagcgtttcgggcgtgggtgagcgagtcggcgggcgggaggtcggagcgtcggggtagttttttgtagttgggatattgggtagtttgaggttcggggaagggcggcgcgcgcggtggagttgttcgggaagttttagttattttttttttcgttattcgttttaattcgtattgtttcgagacgtttaggatagggtattggggatagttgttcggggaagtgggtgagtggcggcgggaagggaggagcgcgggttttgtcgcggcgttcgttttcggagggtttcggtcgcgtttttgttttcgttttgggatttgttttttacgaatttttttttttttgtttatgttttttttgtttatttatttgttcgtggcgtttgcgatcgtagtggtatgaggaggttatcggacgttagttttcggagattgttcgatattagtttttagtttcggtagtttaagtatttggtggtggacgaggcgattaaggaggatttgaaatggtcgcgtttcgtggaggattttattagcgggtcggtggggtttacgtttatcgaggagcggattttgcg

SEQ ID NO: 807 - DNA, 1134 bp, Artificial Sequence
  Description of Artificial Sequence: Synthetic polynucleotide
tcgaaaaatacgttttaggcgtcgggattttagatatttgggaaatagagtgtacgtagttgttgagaggtttcgcgtttggttttttttattattgaggcgtagaggtgttgtggatagtttagatttatacggcgttcgaggtgaaatagaatttttagtttttttatgaggttattggtattttcggttgtttttagagtttttcgatttagagttgaatgtaaagtaagcgttcgaaatgtagaagtagtcggggtcgtttacggtatttgtttcgttcggggcgagagaagacgttaggttgaggttttagcgattttaggtattagtttcgaaggagggcggggagatcgtaaaggggaagtgttcggagggttaacggttttcgcgtattttgcgtttttttgaagcgcgtcgttttttcgcgtcggggattgggatttgtttttggggaattcgtttagaagacggcggcggattggggtcgggtattttttagggttgttaggttttttttagttttgtatttgtcgcgtcgttttatttcgttaggaagttttagagatttcggggatggggtgggagcgtttttttatcgcgggtttaaaaagaaggaaggacgtttttaggggtcgtagaaggaggattagttttaagttataatttttttcggatttaaggtaggtcggttggggtttcgcgtttatacggtttttggcgggggttcgcgcgtttcgggagtttcgcggttcggggaggaaagaggagataagagataggcgaggattacggggttgatttagtcggggtagggattatcgtggaaaaattttggcgaggtggggggacgcggaaagagagcggttcgcgttttgtattttgcgtcgggtatttcgcgttagtgtttcgtttttagtgtttcgcgtttcgcgtttcgcgttttgtttttatttcgggttagttgtatcgcgttcgcgtcgtaggaatcgtggagttggaaagtgggggcgtcgcggttggggggttgttttagttgcgtttcggttagcgatcggcgggtcgggtttaaatttagttaggttgggtaggcggtggtcgcgcgattggggatcgggcgtttcgtttttttcg

SEQ ID NO: 808 - DNA, 10783 bp, Artificial Sequence
  Description of Artificial Sequence: Synthetic polynucleotide
tcgcggagatatttcgagtttcgtaggtgtttgagttgcgttgcgcgttttagtcgggaagtttttttttatttaatcgcgtcgtttcgcggaaagtttgggtattgtagacgtttttatcggtttatcgatagttggttttgaagcgggggtttagaaaagtaaaggggatagtgtttggagttacgatgtttttgatgtgaggcggttttatttaataattaacgaattaagttggaattgtaggttttatttttgttggggggaggattttaaggaatgttatttttttgttttttattttttgttttacgtttagttttttagaaggtattaggcgtgagtagagtgcgaggcgtttatattttcgtgttttttttattttcggatatttttgtattttagtcgaggttttagtacggagtgagggttgtttggggtgttttgttgtgtgtggggcgtttttgtttttcgggttttgattttacggtttgggtcggcgaggcgtttttttttggcgtttggattgtgcgtttgtttcgtttttaggcgacgaacggtaggagtcgggggttcggcgggattcggatttagggcgggcggaaggcgagggtttttttttttcggaattttcgtttcggaaatttgtaattaaatcgggtttttttttcgtatcgttttcgcgttttcgggtcgtttttttacgcgggtatttatttttcgggttttcgtagtatcgtttttttcgcgtttattcgcgcggtcgacgtcgttaggggttttgagatcgcggagatagcgcgttttggcgtttggtggggtttttttagtggttagagcgtttttggattagtcggttgtggtttgtgtttaaatacgatggaaatcggggttgggacgggcggtggtacgtacgtggaggagaagaggtatggcgggaaaattatagtcgaatataggtcgattcgtattttttaggtattcgtcgtcgtttgattcgcggttttttttaaggtttcgattcgtcgttattttttggtattatttatcgggtttcgattcgggtcgcgagttcgttgatgcgtagttgttttcggcggttttcgggttttgttcggattcgcgcgtagagacgttcgggaacgttgggttcgggcgttttttggcggcggtagtacgcggtatacgttcggtttttcggttcgagggggcgcgtggagcgtacgcgggattcgcgcgcgggtttgggttgttggtttatattttttcgtttgttcggatggcggcgttgaggtttattcgtttttttattaataacgatgtttcgggagggaaaaaatagagtttttaaaaattagagtgcgagagaggagtgtgtgtgtgtgtgtgtgtgtgtgtgtgtgtgtgtgtttcggggcgttggtgaaagtaataaaatttagatcgtttttttggcgagatagcggcggttataatgcgtcggggggattaggggtttatttgtagattttggataaaagatgatatatcgatacggtttagagtgttattgcgtttggttttttagggagttataagtatatattttttgaaatatcgtttagtatagtatttaattcgttcgttatttaatatcgggaggggaattttagtagcgtataagcgcgttttcggttttttggttttgggtggggagagtttaaatgagaaggatttggtatgtttagacgtttttttttttggtttttgtttttagtttaagtaattatttagcgatgggttttaataaatacgtttgagaattgtttttatgttcggtaaatattggattagttttttaatgattaggtttttgaaaaggttcgagaaatatatattaggttttaattaagtttaatagttaataggtaaggaaataagttatttttttatttgaggtggggaatgttgggaagggggatttttatttttattaaattatttgattttattaaatatgatcgttgtattaaataggaaagggggcgtatttaagttttttattagtcggaatttttattagtttagttttgtttattaagggtcgagtgattttgtggggaatatatttgggttttagtttttatttttatagagtttagtataaattatttttgtttagtatatatggtttatttggggattgtttatgggagttttgatttggtaattgtaggggagaaggtatgatttaaattattttcgattgtttcgcgttaatttggatcgtttagaggaggtaaaaaatgggtaaattttttggaagttttgttgtgtttttttggtattgaattttgtaagtacgcgatataggagatattgaaaattaaagaggaagtattttttttttttaatatggggagagacgttgttggaagaagtttttgaagtggttttttatcgtattaagaggttagtgggatggattttcgcgtataatttaaaggaacgcgcgcgtttttagtttttcggggttggtaattaagtggttcggtcgggcgtaagtcgttttggaatcggttgtagtttaagtttagttgggttcgggattgagcggtatttttggttttttagaatttttttcgcggtgagtggaagggcggtttcgcgcgcgggcgtttcggggtcggtcggttgcgaaattagggggtggatttttatttatttaggagtcgttaagttcgtaggggatcgagtattatttaggttttgggtattttgagttgttttttgagttttaggacggttcgatggtgtagagtttttaggtagaagttagttttttgatatatatatagtagtgagtaaagtgcgtataagtgagttaaattttgaagacgtaggttcgcggatttttattttagcgttagagttaaggagatagaagagaggaaggagagaagtgaggaagggagagagattatgagaaaaagagattatgaaagtagagaaagagattatgagagcgagattatgagaagagagaaaaagagagattttgagagagagagatagaatgagagagatttaatttttagtgttacggggtttaggcggggtaagcgtttttcgaagttattaaagataggggtggttttttttttttttttttagttttttttttaatagatatagtacgaatttttaatgcgttttttttttatagataataatatagggtttgaaagtcggatataatttaggttttgtgcgggttttttttcgcgttttttcggtttagttggttatatggaatttagtatggagttcgtggatgataaagggatttagtgataggtttaataaaattttaaggagatttttgtttgatttcgggatttattgtcggcgataagcgcgttgaatggtgcggggtggggcggggggtggggggcgggttttttttttttttttttttttttttgttttcgcgattttttttttgtttttttttaatatgtacgtttttaatattttcggtttttagtttttttattgtgcggttttgtatcgttcgttgtagattgggcgaagatagattgttgaagcggatttcgcgtcgggtgcgtttttagggcgttggggttagggttatatagggtttcgtaggcgtttttattgattttatggggattcgaggatagagagaggcgggcgtcgggtttatttttcgggttttcggtcggttataggagcgtatatttagattgtaggttcgcggttttggttatagttttaaatttgtttttaatgagtaagtggtggaagtttgttagggtgaggattttttacgtttttttttttttttttggaaatttgagggttttttgtgattatttttattttggaagttttggggtttggaaaagttaaaatggttttaggttttttgatagtttcgttttaagagatttgaaatttttatttttttttttaagaggattttgggattaggggaagttgtaagtggatgttgagtggttagtattagggtaggttgggcgtttaattattgtataataaattatttgggagaaattcgttggtttttaaaaatagtaagatataagtttttaaatattgttaagttagtgtggagaataaagggagattttttagtatttagaaaaattgtttttttttcgaggatgagttcggagatgggaaaggatttttattggggtattagaaagattttcgagtttttaattatttaggggcggtgtggaacgcgggaataaagtgttatcgcgtttttgggttgttgcgtagagtgttatcgacgtatagatttggtcgtacggataattatgtttgttttagatattgaattaaatttgattattaattatagggagcgagaaagttagttgggatcgttttttttgttcggtttttttattgttatttaattttttagttttgatggtgtagtttcggagagaatagagatataatttttaaatgcgtcgacgtttagttttttagcgtttgtagtattcgttgggttttgagttagagttttaagtatttttagaaattcgcgagatagaggagaaaggtttattttttagttggttaggttttttaagacgttttttcgcgtggttaagtgtgcgttagtatttgttaaggagatttttttttagtaataagggtgggacggaattcgtttttcgtcggaaagatggatgcgtttttttcgggcgtgttcggggttgtgtgtttattttttattcggggagtttattttatttttaaatttttattttttagtaatttatttagttttacgtttaagggttgatttggggggatcgtatattttggttcggatcgtcgaacgttggagggaaggaggttcgggatttagttttcggagagaggtttggaagttcggaaaggatgggagcgtaagggaagggagaggtatggtttgttgggattgttaaagattttcgttttttggttttttggggttaaagattttagggagggttgtagtattttttttttttttcgagtttagaatttcgcgtattttttttaagttttttaagttaaagtttcgcgcgttttgatcgtttttatttttagttttagcggttttttaggttagtattagttcgtagattttgaaaaggagtggggagtggggagaaggtagttagttttaattttagatttttatttatttatttttttagcgtgaggtaagttaaatgtaataaagtgaaagttatcgagtgtagtggttttaatagttttttaggttgaaggagttatttatagatttgggttagcgaggggggtttgtttttttcgtttttgcggttttcgaagttattttttttttcgtagtcggacgttgtcgttcggggtttagatagcgcgcgagattaggggagatgcgggggagggtgggcggttttgggttttcggtcgatcgttcgtaggtcggaggtcgagcgttttttttttcgttttaattttaggcgcggggtgtagtttgtggtcggaggggtttgtatcgggagtttcgttcgttttagggtttcggtattttcggttttttcgttcgagaggaatcgtttgtgggagtttcgcgggcggtcgggttcggtttttaggtttaggttttcggttcggcgtagtaggataaacgggagggtagggatttttttttttttttttttttaaatataggatttttattaaaatttttatttaaaaaatcgaaagttttttgcgttcggcgttgttggggaatcgcgtcgaatagttgagttttaagttcggggttgaaggttcggaggatagggtagagggttttttgtttatagggtttttttttttatatttgagaaatgtttgtataataaaataaaaagagaaaggaagaaagtaggggaaaacgtaaaaataaaaataaaataaaaaataaatttaaataagttataaagaaaggagttggatttagacgggaaataggtcggttttgaaggttattttggtaataattattatcgatatttataacgaaaagcgaaatttgttattagttgttagaacgtttatatggttataaatatttagtatttttttatttttttttaaaaaaaggaagaaattttttgtatttttaaagtgttttttatttgttttagaagacggttgataatatcgttatttatataaatatattttataaaatgtacgaaagtaggggtggggggtcggtttttttttcgtttttaagtgacgatattaacgttgggacggtttggttttttcggggagaggtaaagaagcgaagttgcgtaaatattttgtaaatacggcgtagagtttagtttttttttaaggtttagaaggagaggtatgggtagagttgggtgggtggaatttgttattttaaggagacgtaggtaatttttcggcgtttttttagtggagtcgagagttaattcgattttataataataattataataataataataattattataaggatcgaggttttttcgtcgttatcgtcgtcggggtggggtttgggtttggggtcgcgagtttcgttggggcggcgtttattaagtttattgttgggtttggattagggggtgtgttgtcgggtattggggggtgttggtcgagttgtattgggcgttgtattgtatgtgttgtagcgattgcgcgttgtaggtagaaaagggaatgttcgtttggaaggtggcggttgttaggttttgggttttgagcgcgtgatatggtttgtcgtttttgattaagacgggtacggttattcggcgcggcgagggtaggggcgttatttttatatttttttcggttcgggcgcgttttattttgtagcggtggttttggaattagattttgatttgcgtgggcgtgaggcggatgaggttggttaggtgttcgcgttcgggcgtcgataggtatcgttgttgtcgaaagcgtcgttttagttcgtaggtttgcgttttggagaaaagtattcgtcgttttcgttttttgtcggcgtttttttcgtcgttcggggtttttttgttattgttcggtgattcgtcggtcgagggtttcggggatttggagtttgagttttgagggggcgtttcggtagttagatcgtgtattggggggagggggagagagaagcgcgttaggcgtttggaggtcgcgcgtagtttgtattagattcggagtattttggatttttcgtgcgattttggattttcgcgtttggtagtttagtttcgttgtttttgttatgatttttgtttttttttacgtttgacgaagacgtcgggattttttagggtaaagagggaaattcgtaggagtgggggttaggggttcgttttttaaggggtttatatagtgtgggtgagaatttggggggggaagtggtattgaagattatcgcgggttaagggtttcggcgtttttaagcggtttttttttcggcgagacgtgggtagatttttaaaagaaatattttataattttagtattgatcggttcggttatttaaggtaggtttttgggggttttcgtttttgttttcgggttttttagatattttttgtattgtataaagcgttttttatgatcgcgtagggggtagggtgagttatttatattcgggttattcgaagtttttttattttttattcgtattcggacgaggttcgttggttatttttagggcgttaggttagttttttttagcggtcggagttcgggggttgcggttggagttatcggttcgggttgatattatatattagtttttgggaggtatagtttttttttttttttttttttaatttttcgtattgaaaaaaattttggagattaagttttttttcggaattaaggaggtttgaagaggagggtagaggatattttatataggtgttaaaaatttttttacggattcgagtgagggggttcgggtttatatggttttttttttttttatttttagcgtttaattcgggttgcggttgtaggaatggaggggattacggtttcggtagttaagttttgttatttacgggagtattgaaggttttcggtgttggttagttagcgcgtgtacgggttgtcgttgttgtcgtagaaggggttttttaggggtaggttttgtatcgcgtttagggcgttttgttttagcggttcggtttttttggttggttcgggtttttcgtttttttttttcggattttcggttatagagttttttttatcgttggtgttcggtaggtttaagatgtttttgatcgaaaatttcgtttttgtgttggttagcgatatggttcgagattttaaaatttatgtcgtaaagttgtagttttatttggttaattcgtggcgtttttttgtttcggcgggcgggggaggggggagttggggggagggattgggggaggggaggggggaattggttttaattattgggataattattatttttaaaaagagaaagaaattggggatggggaggaaaaaaatgaagtttaatttagtgtttttttttgttttttttgaaagtacgcggaaatggacgtaggaagtcgggcggtttgcgcgtcgagcgtcgcgggtttcggttttagtttttaattttaggaggggtgttaaggcggcgttagttcgggtttcggcggtcgttcggcgcgcggtggcggttggtggcgaggaaaaaatgggttattgttcgagcgattagtttatataaggttgggttttatttacgaatttggggaggcggggagagggggagaaagagagggagggagggaaagaaagagggagggagggggagcgagagagggagcgggagaagggtggaaaaaagggggaagagatattaaaaacgtaaaggttggttacgtgtgggcgggttttgggagttaagtggatgaagatagtatttgtagatgtgaaattgtgggttttggggagtttcgcgtttttagttaacggttttttagagtaagatgagaggtgtaacgtgttaattaattgtaaagacggggcgagtttttttttttttaaatttagtatttatatataaagggttatcgcgtcgttcgcgagtttatatatttgaaagggtcgttttaataaattgtattttaaaaaaggtgggggtggggaggaggaggggagaaaataaaatagaaattaggaggagggaaaaaattttttttaatatttatcggtttttattttttcgttttcgcgcgtttattttcggtaagtcggaaaattggcgatttgtggcgtttttggaaaagggggagggggcgaaggtcgagttgcggaaattttttttttttatcgttggtggttgtttaaataagattcggtttaaatggtaagagtttaatttttgtaagttttttaggttaatattttggttgaggtttaaggatgagtgttagaaatgataaggtaagtaattgattttagttaatcgcgagagagtttaaaatttaggagagagtttcgtttcgggtcggttagagttattattaagcgattcgtttttttttagtcgttttttatttgttaaagatttatttattttttttatttcgtttttttttattttttatttttaatttttcgtttttatttttttgcggttaaggaggacgcgtagtttattttttgttttgcgggcggtttcggggagggcggggtaagagtgaggagttttaatttcgtttggggtcggattttggttttgttgtttttgggttttgcgggttttttttttcgggtggaggaaagggtagacggttttgtttttttttgttttttattattttttttttttcggttttttttttttttagtttttggttagaggtggagtagcgggaaggcggcggggcgggattgcgggggtgggggtgggggttgtgtttttagtttgggtgaagatttagaaagttgcgggggaggggggtcgttgggtggttcgacgatgtttcgttttttttttagttttttttttttacgcgagttttttagtgtggtttttttttggacgttttgggtgcgttcggagtacgcgttttacgtttttaggttaagttaggttagtgtgaagtttttagttattttcggttttgggaattgaattttttcgggatttgtatttttttttcggcgttggggttggaaaagattacgtcgtatttgttatttttttttttagttaaaatttttttggggggggggtgtaggggtgtagattggttatttgatgttcgttcgttttagaggagtgttaggaaggagttttgtttgggggcggggaggggtatagaaggttatttttgcggggtttaggtttagtttttttataatttgggttttttcgcgcgggttaagttgagcgcgcgggtatcgggtttttttcgcgcgtagttgtagcggacgtcgtcgcgttttagttgttttcgggttgttagcgttgggtgagggtattttttttcgagtcgttcggcggttttttgtagttttagttgtttcgtttttagtatgtgacgtgggtgataatggtttaggttagagtaagtttttcgtcggcgcgttttgggtggtcggattcgggtaaatataaatataaatcgattgttaagttgcggataatgagcgaaatgtagataaatgtttcgttttcgttggaagtttttgtttcggttcg

SEQ ID NO: 809 - DNA, 2194 bp, Artificial Sequence
  Description of Artificial Sequence: Synthetic polynucleotide
tcgcgggttattatttggacgcgatttttcgttagggtttttttggtttgggttaaagttggtggttattttcgcgcgggttgcgtttttttttttttttttgtttttttttttcggggttcgcgttcgttgtttttagtacgcgcgtcggtaggttcggtaagcgaagaggagcggttcgttttagggcgtttttcgtttagtttgtcggttaggcgagcgcgacgagagttttttcgtatttttttttttttcgggggtcgagagggttgggtttcgtttcggcgtcgtagttttcgatttttcgtcgttcgggttgtcgtcgttgtttcgcgttcggcgttcggggtagtcgggggcgtaggcggagagcgtagggcggggagaggcgtggggagtagagcggcgttgaggggagggtagaggaggagagagtttggtagcggaggagtagaggcgggcgtcgtatcgtttcgtacgttcgttcgttcgggagagtcgcgggcggtcgtttgggcgtatttgtcgggttattttgtttcggaggtaagtttagatttttcggtcgcgggggcgggcggaggggttcgtagtgggcggggtcgcggtaggggtcgcgagttggcggcgggagttggaggttgttttgcgttggcgggtgttttagttttggtttcgtttcggagcgcgtagattcggcggcggcgtggcgttcgcggtaagttcgggtggtcgtcgcgacgagatttgggagatacggggtcgtagggcgggagggggagttgagtcggtagagaaaatgtttaggaaggggtcgatgttggtttgggttgtattttggtgttttgttatttcgggagacgcgaaggggttgttgtgcgaattcgatgggagttggtgagatcgagaattgagagcgtagcggagttaggttgtttagtagggttatgagggcgcgcggcgggttaaggttttgcgggttcgggttgtttttcggagtgattcgaaggagattagttagggttggtgagtcgggcggttacggagttggggatttaggtttgtttgggagtaggaagggaaatagattaatttttcgagcggagcggtaggtaaggtgtaagcgcgtttgggatggggaatttcgacgggcgatcgtggcggaagtagagatttttggagttttttttttttagttaggataagatttgtttttaaaagttgtttggtttttggtagtcgcgatagtttgtagttttgggagttatagttttggcgtcgagatgggagcgagtatatacgtttttttggttttaatttgaatttcgtttttttttagtcgtgatttttgtttttttatgtgtattttttgggtagtgaggaggaaggaatggtttattggatgagttgggtattttttttagggaaggggttttgtttttatgcgttttttgtaagattttattagagtggttttggtagtcgagttttgaggaggcggttagaggggtcgtttggcgtttttgaaagacgagaggaaggggttttttggtagttttgtttttttttgggggtttcgttgtacgtagaggtttgggcgtttggtatttagattttaggtgcgtatagtttttttgcgacgttagatgcgttggcgtcgcggcgtttttggttcggatcgatgtttgcgttttttttggttacgttttggtgtttagtgtagtagatatcggtcgaaggtttggttgattgggggtgtcgaggggaggggggttgggcgttatatagtggtttcgttttttggttggaattagttggtgaggcgtgcgcgcgcgagttcgtgtatttgttcgttttttttttatagtttagcgtgtttggtttgagtttaaagaaggaggtggtgtgtgtgttgcgtagatttgcgtttgtggggtgagtagttttatagtttttagagtcggttaattttttcgtgttaggttgcgattttaagggttgtcgcgtcggggatcggaagtggtttttaaagaggggtttaggtcgcgaaattttggtagtagtcgaagtgaaaaggagttgttaggaggcgggcggggggtagtttgatgttcgttttggcgcggataggaagaaattgaagtcgaatttttagttgaattgcgtgttttgtgtttggcggtggtgtggttcg

SEQ ID NO: 810 - DNA, 284 bp, Artificial Sequence
  Description of Artificial Sequence: Synthetic polynucleotide
tcgtttagtttcgtttttcgtttgtcgggacgttagagtttttttttttttttcgttgttttttttttggcgcggattatttttcgggtagtaaagtagttgtttcggtttaacgcgtaaagtttagaaagttaggagtttttagatggttttggtgatttttcgggattatgtttcgtcgttttttagtttggagagaagttatttcgggattttttattttttcgttttttttttcggttttgttcgagtttaggaggcggcgttggcgtgcgttattttcg

SEQ ID NO: 811 - DNA, 603 bp, Artificial Sequence
  Description of Artificial Sequence: Synthetic polynucleotide
gcgcgtagtcgaagtttagtgttaaggaggtcggagattcgggtgttcgcgtatttcgaaaatagtttttgaggggttttttgagtatttttttagcgtgtttgggaggtaaattcgttgattagtttttgagaggagtggttagaggaatttaggcggggaaggggacggtggattttaggagagtgtaatttataaaggcggggggcggggacgtttaggttcgagttttaggattttgcgtcggacgtttcgttcgtttttttaggttttttgttcggttttcgtattcgcgcgggttcggagaatttttgagtatcggtttttagttttcgggcggggttttagcggcgttatttattcggttttttcgttatttgcggggttattttcgtatattttcggcgcgtaggtcgcggtttttcggagttgaggtgttggggtttggtttgtttgcgtcgcgatatggcgcgaggatcgggtttttcgcgcgtttttaggagtggtttattttatataacgaattttcggagttcggaaattattttttttcggtcggaacgcgtatgtttcggtaattttgtttattagtcgagtagggcg

SEQ ID NO: 812 - DNA, 6511 bp, Artificial Sequence
  Description of Artificial Sequence: Synthetic polynucleotide
gcgatttcgggggttagtagagaggagaggttgcgggaggattcgttgcgaagggcgaggggtggcgttgggtgggacgggcgtttggggtcgtgtagggtggtttttgggtgttgttcgggttgtttgtcgtttagtattggcgtaggaagacgggttcgcgtagcgtttggtaatagtggtttgttttacgtttggaggcgattaagttttgagttaaaggcgtcgggtttagtcgggaagtgtatggcgatttagaatacggagcggagaaggttttaggggatacgaggttatcgttttagttttcgggtttgcgtttcgagcggttagggtgcgtacggatgggtttcgggatgttagtggagaggtgataggagtttattattttacggttaagcgtgtgaggttttcggcgggcgggggtttttttcggggtagggtagggggagagttaggtatgtttttaacgggttttttagtagaatcgttaggaaagtggtttttaattttaggtatttttgtggtttttaggtagttgggcgattaaaaatttatttttgtttgttgtgaaatgggataggtggttgttaggttagagattgtgtttacgaagtttcgtttggcgggtcgggattgacgtggattcgggtttttttcggaagtttgggaatttgtgagttttttagtttttcgttttattttgtttgtttgaaaaaaggagttgtttgagaggaagagttaaggtttaaaaggttttaaacgaagagtatgcggtttgacgcggagcgtaaagaagcgagtagtgaattgaatttggtgggattgagattagaggcgtttgtatgcggcggtcgtttcgcgttttattaaagtaatttgttatttacgataattatttttgtaattattttggagtggttgtgatttgatgtttgtggtgttttagggtatgtttttattggatatagatattttagggtgttttttgacgttagtgtcggtttagtgggtgttagtgtcgcgaagggagggtggcgggcgtgaatgttttttttttttgggtttgtcgtaggtttcggtttttttattttgtttgattttggcgggtttgttatttattgaggtttttatcggcgtttacgttgtttcgagaggcgggataaacgttcggcgcgtggcgcggagtttgcgaaagcgttcgggggtttttattttttgttcgggagttttttttttggggcgggaagaggagtcgtagatttgttcgaattttgttttattcgtttggtcgttttttttcgtttggggtgggggtaggggtggcggatgatttaggtttggggtcgggagttttgtttttaaaggtattatttcgcgtttttttggaagtggcgcgttgttggggcgttttcgttgttgtagaggtttggtttgcggttttataggggcgtgggtttagggtttttagggagtaagtgagtttaggttttttagggggcggtagaggggaattttcgataattttttatttttttttttaggcggttgcgaggttttcggggttttagaggggtttttttttgtcggtgtcggttgttttgagcgcggttacgtagttcgcgtttttacgtgggtaaggggcggggacgttggagggaggttgttttggatgttggagttttcggttttcggttttgttgagtagaaaagttgaagttaaggaagggttgaggtttttttataagggcgcgcgcgtgtttgggtgtcggtttagaagtcgagaatgtgcgtattggggaagggtttttcgtgtcgagaagatagaggatttgttttagttgtttttcgtatagagggcgcggaggttgcgttttagttcgaacgtttatttattggaaagagggtagcgtcggggtttagggaagttttttgggaatgaatggtttttgttaagcggtttcggattttttgggttttttgggtttacggtacggtgttgcgcgagtttttagtgtttatcggtttttttcgttttttgcgtagacgtttttaggcggggaggtatatcggttttttcgggtagttttggttagtgttgttgtgggaaaggagagttagggtttgggatgggggatgagtatttttttgtttatttcgggttttagcgtgtaggaggtaaatttgttagtatagataagatagtttgtttaagttgtattttaggtcgggttagagaataaaatcgagggttagaaggtttagaatgtcggatagtttagcggtattcgttagggagttttaggcgttcgaaagaggcgtcgtatttttggcgagtttaggatttatttttttggatttgtgttttggagtgtttgcgggtttgggtttaatttttgtttttggtaggtgtttttttttttcgtcgttaatattaggagcgttgtttttgcggtaatttattttatttttagaagtttgttttgggatcgaagtgttagggttttgtgtgtttttttatgtattgttttttttagtgtaaagttttgtagatatgtttggtcgaaaagttttagtggttttaatttttagattttgttttcgcgttcggtcggaaaattatttgggatttggttgttgtttaaggtcgggggaaagttttttttggaggacgtttattattattatttttttttaggtttatttgggtttaaataaatgttaaagtttaaacgaattcgagaaggaatagcgaggtagtggatgtcgttatttcgtggatgggagagttatgtttattgtaggtgcggatatcgtattgataggtattgattattgtaaaatcgtatttagtattaaatagaaatagttttgttttttaatttttatagaatgtttaaatttagtttagggagttagttggggcgttttaataaatacgttttcgagaattagcgatgttttttttataatgaaagttaattgttgtataataattgggttaaagaatttcgttagtttaaattttaaaaattagtattgtattttgtttttaagtttgggtggtaagtatcgaaggggagagggaagtagcgtttgtgtggaaggaagtttcgttttttgtttaaatatgtgggatttgggtgtttatttttttagtcgagagttttttgtaggtttttttttaattttttgtatttttttatttttattttattcgtggcgttcgggttttatttttgttcggcgttttttttttagggcgagtagaggtttttgagtgatcggttcgttagaggtagttgtagagtcggcgtttcgtagggtagggtagggtcgggtcgttgggttggtttagtgcgcgcgggttttttttggttttagttagtcgcgggagatgttatttcgggcgatagcggcgagacgtcgttgttcgtaatttttgggcgggtaggatcgtttgttgtttttgcggtttttggggtagattttttaggagttttttttttttttttttcgttcgggggtcgggatcgcgttgtgtttacggagggaattgggcgtttttggcgtattggggttttagttgtatgattttagtttagattttaagttttagtggggtgtaggtgggatgggatgtgtttttaggagatgaggagatttcggttgttgagtcgttttttaaatgcgtagttttttaattttaggtgatattcgttttttggaggaacgagtgaaggtcgtttaggcgaaagaggggtgggttttagtatttggatttttttttttagttttgttaattttaggtgtgtttacggtggaggtgatagaaggaaggcgcgtcgggggatttaggtttcgtaggttttcggttgttaacgaggtatcgtttattgatttcgcgtttcgttttttatagcgtggggttcggcgttgcgttaggttcgggtgcggggcggagttaggttgggattggttgggggtcgtttcgttcggcgtttgggttttcgcgtcggttttcggggaggagttatgataattttttttttattaaggcgttcgggtttttcggttatcgttaggatatattgttcgggcgcggtttttttcgttcgcggagcggttttgatattcgcggcggtagtatttacgttcgtagagtcgtcgatgcgtgtttagtgattcggatagtaaggttcgcgcgcggcgggggcggcggtagacgtttggttatcgtgatttcgattttggatttatcgtttgggggttggggggattttggatttaattggcgattgttttgggggacgtcggacgttatgttgtggaaaataatcgataatgttaagtacgaagaggattgcgaggtgagttggggtttcggggtgtagtttcgtttcgtcgaggatagttcgggaggtaggggttattggatcgaggtcggggacgagggtataggagttttggtttttcggtgggacgggatttattttttcggatattttttagtttatttttgcggggttttttttttgtatagggtttttttttaaatagttttttttcgggaacgaggtttggaaagagaatggtaaattttatttatatagtttatcgggcgtttttttaagcggtaaatagttttgtttttcgttttttcggaaaagtgtttcgtttgtaatttttagacgtggtttttacgtacgaagtttttgtttaaaggggttagatgaggttatttgttagcgatattttggcggatatttttttaaggtcggtttgttatttgtttcgttattttttcggggaagtacgaaaataatcgaagtttggtttttaaaagaagtgggggttggggagtggtggtgggggtgttcgaggttagatggggtcgtaagagttcgcgagtgttttagtttgtcggataggttgagttagagtttcggagagtgggagggaagaaggaggcggcgagcgggaagaggaagaagacgtaggtagcgttaggcgagtttaggggcgtcgggagcgcggagttcgggttacggattcgcgggagtttattgcgttttcgggttttggagggttgtttttgttcgtaggttcgggcgttttcgttaggaggcgatagcgttatgtttttttaggttttcggcgtttcgagatttttgggtagatggggacgtattttttagaaattgagtcgggtcgtttaggggcgagggaacgtgcgcgggtaaggttgtttaatttttagggttttttatgttttttttgcgtttcgacgtgcgagaatattgtttttggtagtgtagggcgtttttatttattatttttttcggttgggttcggttagtagggagggtcgttttgtgcgcgcgttttttttttattttttagggcggcgtagggtggcgggttttgtttttcgagcgtcgttcgttcggaggtttttgtttcgagggcgtggaagggagggtttcgggggcgggggaggtgcgtatttttcgcgtcgcgtattttattcgcgtttgtcgcgttgttatttttagtagtttttgcgttatgggcgggttttacgagatagttttgtatcgggcgttcggttttttcgtttcgggttttggttttttcgtttcgggtttcggttacggatttttttggtttaagatttagggttcggatttggcgtttttaagcgtttcgggtttgggagtagcgtttagattttcgtcgtcgggttttgagaattcgtttttttaggttttttattagattttttttttttttcgtattttttgtttataacgaaattttcggggcgtattgttttcgggtatttttcgattttgggtaagtttcgtcgggcggggtgcggttggtttttcggggttttttgcgtagttcggcgatgtcggttagttcgtagtagcggggtttcgtattaacggggttttttgtttttttttttttttttaggatcgttacgacgggagtagtaatgggaattcgcgggttttttatttttttttcgtcgggtagtatttttatagtttcgcgttattttttttttatattggagtcgtcgaatattagtcgttattttattttttttttttttattagtagttggtttatttttagtcggtcgatttttattcgtatttgggggaagcgtacgtcgtcgttattaattttttgtattagtcggcgtttataggtagttagtagtaggtttggttcggtcgttagagttaggagggagcggggttgttttcgtattacgggcgttcggtcggtttattgttttattttttcgggttggaggcgggcgcggtgagcgttcgtagggatgtttatcgtcgtttcgatttgttgttgttttacgtatacgttttggatgtcgcgggtttggtcgagaatttggggttttacgatatgttttattagatggacgaggtgtaggtgagcggcgttgcggtttttgatcggatttgtttattttacg

SEQ ID NO: 813 - DNA, 1560 bp, Artificial Sequence
  Description of Artificial Sequence: Synthetic polynucleotide
acgttttgtagtgtcgggttttgcggcgattattgagttttttcgttttcgtttttagttttttcgttttcgttttcggttttcgtttttttagtcggtcggggttcgtcgtttacgatttcgtacgtgtcgtcgacgtcgttttgtcgatttcgtcgtaggaggtggaattgtagtggtgtcggcggttttttttttggggcggcggtggcgaggcgttcgttggcggcgggtagcggttggatgaaatacgttttttttagtaggtagaaggcgtcgcgtacgttttcgtagaggttgagggcggtagtcgagttgggatcgttatttacggtgtcggagtagaagtagtgcgttaggtcggttttcggaagcggcgtttcggattcggatttgcgttttacgttttggagcgtgaagtcgggcgttaaaaagttgttgtcgggtcgtagttttagatttagttgttggttaaaggcgtgtaggcggaggcgcgtggtttcgtgtttcggggcgcgttttagtttcggtattattagtttttcgtttttttcggaggggcgttcgagtgcgttcgatacggttagtagcgtcgcggcgagtagtagtagcgtgggtattggtttaaagtttcgagatttcggagttcgtttcgcgttttttatgtcgttgtttagtttgcgtttttcgaatttttcgggtatagttcgttgtattggagttttaggagatatcgttcgtagtagcgtacggagcgagggatttttagttcgggtcgggagagtaaagtttcgttggtttgttttggattgttaaaattaataatttttattattcgttggaagggcgcgtagagtcggttatagtcgaagttttcggagttattaaaaggaggcgttgtagttttgtcggcgcgcgggaagttttttttttagcgtaaagttggagatattgagaggtaggcgtaggtagagtggttttgttgggataagaagcgttttggggcgttttcggggttgaggtaacgcggagattggtgtttggcgttttttttcggttttcgttttggttgcgatgttgtttattttgtttagggttttttttttttcgttcggtagcgtattttggttttgtaatagtttttggttcggagtcgttttttagcgagtgtaagaatcgggtagtcgagcggtttttttatagtggattagtgaaatttttatttttattttattttttttttttggtttttttttattttaaagacgtcgttttcggtttcgttggtgttaaatcgcgtttcgcgttgcgggttcgggagggggagggggtagttttcgcgttggttttacgttattgttcgttaatttaggggcggaaggggcgttgtgattagtattttgtattgttggggtcgttttagggagaagatttttttttttatcgtttttttttttcgtcggttttttggattattttttttttttatcgttcggttgcggtaatttagttatcgcgttgggttgcggtttttaggagggagggttcggttggagaacg

SEQ ID NO: 814 - DNA, 572 bp, Artificial Sequence
  Description of Artificial Sequence: Synthetic polynucleotide
tcggtttcgggatcggtgtttttcgaagttttttcgatttcgggagcggtttttttagtattcggcgttcgttattattgcgtttcgcgcgtcggttcggttttcgttggtttcgtggtaagaacgggggcgtttcgagtcgggttttttttcgcggggtcgggttatataaggaaaagttaggttcgtttcgttcgttttgcgttttagcgtttggtcgatttggggacgcgggtagtcgttttcggtttcggttttcgtatatttttgaggattgggtcggggatgggaggaatggggacgtttggggatttgtacgtcgcgtgtttttttattattcgtcgggacgttttttgtttcggtttcgagttcgagttcgattttcgttatttagttgggtgttttggggattttggttttttttttttagattcggatattgaagtaggcggtagcgggtgtttttttatttggttattttttcggcgtttagcgcgaggtagggtgggcgaggcgagggcggcgttttgcgagggagggcggtcgtagaatttgcgggtttttagcgtttt

SEQ ID NO: 815 - DNA, 1021 bp, Artificial Sequence
  Description of Artificial Sequence: Synthetic polynucleotide
gcggcgttacgaggtcgagaatcggcgtttagttttatttttgtggttgtagagtgttaagttttaggttttgcgtttagggtaggggttaagagtagttggtaagggcggcgtagtttgtggggtttttgggcgcggcgggtcgtagtttcgggaagttacgttagtttatcggcgttgtagttgtagtcgttattagtatacggattaggggtcgtcgaggattgggaattttcgattaggattgcgtttttagtcgtgcggatttcggggttagcggggtagcggtaagttaggtagtttgtagtaggagcgttgggtatgggtttcggttcgggttgtaggaggcgtgtatttttcggtcggataggcggcgtatttagggattaggaggttattttaggtgagtttcgttagttttagtcggagttcgagttgtagttgttatttgtaagtggtgttttggttgtagcggtggtaatttcggatttagttttttcgtttcgcgtttattagcgcggattcgggggcgacgtagtggcgaagtcgggttgtgggttcggcggcggtattaggcggagaagcgttatttaattttatttttgggttgtagagggtttagcgcggagggtttcgcgcgtcgggagtcggtggaagaggagaagagcgcgcgggcgatagttatataggttttggggtagggcgcgtttcgcgttttagggagttacgttagttcgttgcgttttcgtagtaatcgtcgtttgtacgtggcggggcgagagagttgttagggcggttttttcgtttcgggtttgttgggcggggtcggttaaggtgcgcgtgttcgttggttttaacggttttgttgggcgtttttgttgagaggcgggaggggttgagagtttgtgcgaaggtaggtggatagattgtattgtttgttgttgcgtttcggaggcggcgattttcgaaggcgagttgaaatacggttggagcgtttttaggttatagtttgtagtcgacg

SEQ ID NO: 816 - DNA, 1281 bp, Artificial Sequence
  Description of Artificial Sequence: Synthetic polynucleotide
tcgaaagtttaaagtttcgggtttatcggttagttttttatttcgttgttgggtcggataggtgtaggggaggcggattcgtttcgtagtcgatttatttagttttagggtttggtcgtatttgagtagcgcggttttcggttgttgttggcgttgtaggtttcgcgtttggtttgttagtttgcgtagtcggtattcggtcgggaagtatttttttagtaggtcgtttagtattacgtttacgcgtcgtatttgcggtcgcgcgggttttggttttacgtagcgtttgtagattgtgagttcgtagggtagcgttatcggtttatgtagtagtcgtcggtagcgcgggtagtcgagtaggtcgcggggcgcgcggggtttcggggtcggttttttttcgtcgggcgtttcgggttcgtcgttcgggtttttcgcggatagcggtcggtcgcgtaggtttacggcgcgtattaggtcgttcgttagtttttttagttttttcggtcgtagcgtttcgagtcgcgcggcgtcgcggaacgcgtttagggtttcggggaggcggtcggcgcgggttagcgcgttttttagttttaggtataggtcgcggttcggttgcgttagttcggttagtatggagcgaaagagttcggttgttatttcgtagtcgttcgcgcggaaggtttcgtcgtttttttttaagcgttgggcgatcggtttcgcgcggtcgtagttaggatattggggcggcggcggcggcgggatcggttcggggtttattatcgcggggttgcgacgacgcgggttcggagcgaaggcgcggagtagggaggatgcgttgttgttgggaattggtcggcgggagcgcggttttagttttcgttagtagttacgcgcgtttgggggcggcgcgttgcgagcggttgagatcgcgggcgggggcgggcgtttggtttgggtagcgtttttagcgcggtgtgggcggcgagtttcgtagggttgtaatcgtttcggggtgggggtcgggataggtatcgcgggcgtaatttgagtttttgtttacgcgtagcggttttttagtttcgtcggtttaggtaatttaggtcgttgcggtaacgtagtgatcgcgttttaggttcgcgttttttgcgatgttttttttattcgtttgagggtttttgcgcgattgcgcgcgcgttttttgtttgtcgttttttcgtagaggtgtcggggttttgggagtaggtggttttggtcgcgggttgttggcgcgtcggtatcgcg

SEQ ID NO: 817 - DNA, 2029 bp, Artificial Sequence
  Description of Artificial Sequence: Synthetic polynucleotide
tcggaaggcgtagttataggacgttcgttgtttcggatcggaaggcgtagtattttaggttataattttagatacgttttcgggtttcgataggtgttgttcgttttttacggggtttcgggatttcggttttcgggttgttttttgttttttggggcgttggagcgcgcgtagtggcggagttggagttatttagtgtttcgtacgggcgcgtttcgttttttcgggttttagcggaagtttgcggggggcggggtaatcgcggaagtcggcggtcgtgggcgcgcgggttgggggttttcgcgtcgtttcgggtttttttttttttcggttgcggttgtcgaagagaggtcggagcgcggcgttcggttgttttatttggcgcgttgagtatcgcgcggggagttttcgggggcgggcggtggggggcgcggattgcgggaagaaggtacgaggcgtcgtcgtagttcggttaggggtcggggtttcgtcgttcgtcgttgtattaatttgtcgtttggtttcgtttcgtcgtcgcggttcgttgcgttttgggtggcggggggcggggagagcggggagttagagggtttgcggtggtcgagggagggattttacgacggggagttcgttcggtgtcgttttttttttttttttcgttttttcgttttttttatttcgtttttttcgtcgatttcgggagcgacgggcgttcgtgatttgcgaacgttgttaagtgacggttttcgagtttgaagcgttcgcgaggaagcgagcgttagcgcgggtcgtcggcgatgacggtcgcgaagtaggagtcgtagtttatttcgggggttagggcgagttaggcgtagtcggcggattaggtgagagtcggtagtcgcggttaggttttttcgggaggggtggttttagtgcgcgtttcgttcgtttttcgttttttaggttgggttttcgcgtttttttttttttattttttttcgtttcgttttagttttaggtttttttgtttttttacggattttgcgggaagttagagtttttgcgtgcgtttcggggttcggcgagaggatgcgtaaggtggagagtcgcggggaagggggtagagaggtaaaggttgaaggtgtttcggggaatttcggcgggcggtttatcgagggagggagaggcggtcgggattaaggaatggggttttttggttttttattaacgtacgttgaagaaatttgttgcgtttttgacggtcgtttatcgggttcgagtttcgtttttttatagtcggggcgttcgttggttaaagcgattcgagtaggcgaatgatttttaggcggacggggttttttttttgtttttttgttttttttgaggagacgggtgtgtgtttgtgaggtggggatgggggaagagtgttttagatattcgtagtttgttgagcggaacggagtttggggagcggcgaggtattaacgattaagtggagtcgggaaggcgttggttttggtgatgtgttgggtttggatgtgtcgcgtttgtatagatgaggtgttttgcgtgggttgagggttatttttgtttttttttcgttcgtttatattcgttaatttttttttgttttggtttttagaaatttgtagtataatcgtatcgtcgtggatttttatttcgtttttgtttttgatttggggtgattgggatttcggtgtcgttttttttttaaagttggagggtcgggagcgtcgagatattttggcgaggaggaggaggaggaggagggaggttgcgttgagtcgggtgtaggtgcgtttacgtttgtattaattaggaatttcgggtagagagagttgtatttaggttagggattaattgtggattcgcgggatttaagcgttggggtaggaggattggggatttttgttcggagtgcgttgcgaaggttgttggaggcggatatttttttagtttattgttagcgtgggatagagggagcgtacgcggttaggttttagtagcgattcggtttttcgcg

SEQ ID NO: 818 - DNA, 1793 bp, Artificial Sequence
  Description of Artificial Sequence: Synthetic polynucleotide
gcgttcgcggtaagggttgtggtcgggtttgttttaggaattttgggttttgattcggttcgcgggtaggtttcggaaggagttgcgcgagaaggggtcgtcgcgggtgttggagtcgttgaaggacgtggtgttgatcgaaggtagcgcggttaagtttatttgtcgtatttcggttttttcggatttatttattcgttggagtaaggacggtaaggagttacgtgacggttttaagtatcgttacgttttcgaggattttgacgtggtggtattggtggtgcgcgacggcgagttggtagatttgggttagtatagtattaacgttattaattttttcggttagtgtttcgattcggcgcgtattttcgtggaaggtacgcgcgtttcgggcgtagcgttagggcgtagattagtattatttagttagagttcgtagttcggtttagttgcgcgtgtttatttttgggtttagttatagggttttcgttagtttagttttgggtacggtttggggcgtatcgtcgcgttagttaagtgcgtttttttttatttcgggatttagttttattcgggttgagtagttagttgtggatttttattacgcggtttcgggtttttaaggttatatagtaagttagaggtagagttagggttggattcgggttttttggtttttaattttggtaatttttattattcggagcggtttttgaggtatcgcgagatgtgtgaatatttaggggttttcgttcgttttattttttttgattttttattcgatttcgagaagtaggagaggtagggataagtttttttaatagttaaggagatgaaattagagaggttaatgatttgtttaacgttatattgcgagtttaaatgtatttgtatttagtgtcgggtattagtcggtgaggtgatgttttgttttattttcgggttttttacggggtttcgttttttttttttttcgttagtttcgacgaagatttaaaagggattcgataatattaaggcgcgtaaaggtattatcgtgacgttgattgcggagattttgggagagtttgcgttcgacgtaggttggattaaggacggggaggatatcgaggaggatgataggcgagggtcgggatttgcggtacggttagggtttggggttggaatttgggtgggattgagtttagaaatttggttggagtgacgggggcggggattgggtagcgaggaatagagttggttaaggagtttcgtttagtgcgttcgtgtattgattacggtttcgttttttttttcgtcgttttttcgtagggtgtttttcgagatcggtagtattattacgacgttgattattcgtcgggttacgttttaggatagcggtaagtacgaggtgtacgtggagaatagtttgggtatggattagagtttcgttcgcgtcgacgtggtttgaacggtattttcggatttttcgttttggcgtcgagttcgggggtggtgggatttatagttttttattagtttgtttaataaagttgttttttgatttttcgcgtttgttttgttttttcgcgtcgttattttttttttttcgtattagcgtttatacgtattttagatttttacgttaaggttatagtttgttggagttatagggaggtttggagagcgtttagcgtcgtgttgtattttagatagttaaattgataagagttgttttcgtcgtttaaggcgtttttattttttagcggtatcgtcggttgggtttgggatttcgtttttttcgtttttgagcg

SEQ ID NO: 819 - DNA, 2697 bp, Artificial Sequence
  Description of Artificial Sequence: Synthetic polynucleotide
tcgcggagacgttaatttagttcgtcggcgcgttttttttttttggtttttattgtttgttagagggttgggaaattgcggttttcgcggtttttttaaatatcgtaattattttagggaaattatttgcgtttttttttcgcgttttgtttttgtgcgttttttttttttttttttttttgttcgtttttttttttttttttttttacgtattcgtttttcgcgcgtagggatttttgggtaaggttattgcgtttcggattcgcggtcgttggtagggcgtttagggggcgtatttacgcggatgacgtagcgcgaggagtttttgtcgtttaggttgatcgtgagcgagaagagcgcggcggcgttgtatacgttttgcgttttgtatagtagtcggttgaggttttatcgcgtcgcgattttcggacgttttttcgcgtcgtttaggttttagttttcgtagttttcgatgatttttagtatgggtcgcgggtttagtcgttcgatttcgcgtatgtcgaggtacgagcggaagaaggcgcgtattttgcgttgggtcgcgtcgttaggtttattttcgggtcgcgttagtaggcgtcgtaggcgtttttcgttttgttcgtcgatggtcgcgatggtgttataggtgagtttgtcgtcggggatggcgtggcgtcgtagttaatcgtcgtaggcgaacgagtagaagttttggtatgggtcgatgttggcgtttaggttggcggttaggaagcgagcggcgcgcgcgaaggttttgcgtttagggtagttttcgggataggcgtcgtcgtcggtcgcgatcgggtttaggtatttgagggttagtatagtcgttagaatggcgtagaggtcggcggcgaatattagtttcgatagtaggtatatttcgcgtcggttttagcgcggtagttcggatcgggtttcggtggcgttgcgcgtagcgtttaacgggaagttcgggggtagggaggtttcgcgcgcgtttttcgcgtcgtagcggtttacgtatttgattttttggaatttatcgtagtgcgtcgttagcgaatacgggggttttatggcgtcgaggtcgtcgcggtgtagatttgggttatttgggttacgggatgcgcgtggtcgtcggttttttcgtgggttttcgtatggttttggggtcgtagttgcgggaagggcggaagtaggtttaggaggcgtcgtagtcggatggggtttagggttatcgcgaggagggatataggtttgggtgtagaggttttagtcgcgggttttatttattgcggaaattagggattatgagggttcggcggggttattattttcgggtgtatagtggagtttttttttttgttttttttttgtatatatttgagggtcgtagggttgggagggtttttattggaagtaagaggcgttaggtaaggggtttggtacgtagtgggtttttattgaaaggtcgttttttttttttttcgttttttttttttacgatttgttttagttaaggtcgggtggagtgggggaagaagcggaggttggagtgaggaggtgcggttaggggcgcgtttatgcgatatttttagtttttcgcgttggatttagatagacgtttcgtaaagcggttaaagaattaaattttgttttcgcggaagttcgcgggatcgattacgttaatttcgttttttggttttttttgttcggtggttcgacggtttattcgttttttttttaggggcgcgcgttaacgttttagggtggcggatatataatttatttattggacggttttgatggagaattcgagacgggttttttttttttatttttattatttttgttttcgtttcgagttatttttggttttaataggttttttttagaatttaaatttgggcgaagttttattttcggcggggagcgagttggttggcgattttcgagtttcggcgtcgtgcggcgtagttcgcggagttcgagagtcgagttcgggagtcgtagtcgtagtcgtagtcggagtcgtagtcgagaggacgtagataaagtcgggaggtttcgcgtagtggcggcggcggcgacggaagtggtcgcggtggtggttttagcggtagggattcgggcgttatttattcggtaggtgcgcgttcgagtcggcggtgatcgagcgggtcgggttcgagcgggggtttgagtcgtagcgtagtcgagcgggcgttcggtgttttttagcgttcgtcgttttttttgtcgtcgcgtcgagttcgtcgcgtcgttcgtttgtcggttcgagggagggggcgcgtcggcggttttattttttttcgttcgtttcgcgcgtttttttttttttttgtatttttcgggttatttggtagtggggcggtagcgcggacgtgggtcggcggtcgcggagataggttttcgggggtcgtgcgcgggttgcggtcggggatttcgggtttagtcgcgtttcgagacgagtgagggtagcgagtattttcgtgaagggtttttttcgatttagtgtttttatttttagtcgtttattagtcggttggaaaggggttggagttggagatgaggagtcgaggattttttcgaagggttgggggcggtgttagtagtgtttgtgtttgtcggtatagtttttggcgtagagcgtatttttattaatcg

SEQ ID NO: 820 - DNA, 1384 bp, Artificial Sequence
  Description of Artificial Sequence: Synthetic polynucleotide
gcgggagtattagcggtttacgtcgaggaagataggcgtttttttttggggtgggtagcgtaggtttggtttgcgggtggggggtggagagtgagaggtacgcggggtattagtttagtttttttttggggatttcgtattcgtagtttaaggaatcggtggagtacgaattttatttttgagttggcgtaagcgttttttttttatggagatttatttcggtttttttttgaggttttttttttaagtattttttttttcgagtatttagtatttttttaattttagtacggttcggggtattagttttttagggcgggggttgttttatcgtttaagggaggggatagagggtcggtttcggtttaggcgatttttgtttttcgttaggggcgttattttggttttttttcgattgtcgttcgtcgttttcgttttttcggggggtgtgttttcgaagtacgggggcgcgggaggttaagggtgtttttagttttcgatcgagattttttttcgagtcggcggcgaatggtaggttttatttaaagagtgtttggtggcgcgcggtgttttttttggagtagttttcggcgttcgttcgtcggggtttcggcgatcgttgttttttttttttttttttttttttttttttttttttcgtttttttttttcgtcgtttcgttatcgtcgcggttagggttggaggcgtcgttgttatttttgtgtcggaggaatcggcgttgtcggtgtttgggggtcggggcgcgggcgaagtcgggtcgcggaggatataataggtagagtcgggggtgttcggtcgcgcgtttttcgcgtattatgtagttttttgttatttttttcgtttttaggttaaaattttgagtatgatggaagataataagtagttcgcgtttcgtatcgatggggcggtttagtcggttagttaggaggtgattaatttgcgagtcgaatttacggttattaatcggagattggcggaattgagcggcggcggcggtttcggttcgggttcgggagtcgcggttagcgtttcggcggcgggggattcggcggcgacgaatatggagaatttttagtttggagcgtaaggtaggatcgtttcggcgtttagggcggaggaaggcgagtagagtacgttcggtttcggaggtggtcggggattcggggttttttatattcggggcgaaatcgttttgtattttggtttgtaatttttttcgttcggcggtggttatcgttgtttttcggttgggagttgtaggttgttgttatttacgaaaattcgagcgtagtgtgtacggggttatacggttatatcggtttcggttagtttgagcgaggcgtagtcggcgggtttttttcg

SEQ ID NO: 821 - DNA, 421 bp, Artificial Sequence
  Description of Artificial Sequence: Synthetic polynucleotide
tcgcgtttattaggtttaggtttgggttaggcgttgttttggcggcgttagggaggatatcgtgtttagagttcggatttagtagttcggtttcgcgttttttttgtttcgcggttcgtaggtttagtttttaagcgtttagttttcgcggtttttgtggcgttatagttagtttgaagaatggttgttttggagacgtaaatttaagagttttgtttttggagttgagaattgtagcgcggaggtttcggagcgagtcggggtagtcggggtcggtgggtgcgttcgcggttcggggagagggggcgcgcggggttcgtgagggcgcgtgggggcggcggtaggggtgcgaaattagggttcgaggggcgcgcgtggtcgggagcggatttgtaaggcgttttttaaggttgttcgttcg

SEQ ID NO: 822 - DNA, 2606 bp, Artificial Sequence
  Description of Artificial Sequence: Synthetic polynucleotide
tcggttttttcgttttttcgattaatggttgttacgcggtttttttaagaaattaggaattcgttcggagtcggagtttaaaatagatttttttttttgttttttttttgttttcgcgcggcgaatggttcgcgtcggtttatatttattcgagatttttttttcggacggtaaggatgtgaggtaggcgagtcggacgtcgttcgtagtatcggagagggcgtattgtaaaggcgggtagtagatcgtggagagttcgggagcggagttggatatcgtttcggagggaagaaatgaggtagcggcggttttcggattcggttatgttcgttttttgttttcggagtttagcgtcgtttcggttaggttagttcggatattgagcgggtcgagcgcgagttttcggcgttcggcggagcgaagatgtagtgagttttcgcgggattgttgcgcggggttcgtcgcggttagtcggatttagtattcgatcgtattttgggcgagttgttgatttgagattagtttaaacggggggttttttatttttagtatttttcggaggtggggagtatcggtttttaggtatattcgttgtagagttttcgcgggttttggttttagttttgagggttgtgtgtgttaggggatttattttacgttcgtcgaggagtttttgtatatttttgtattatttcgggtgttgttgttggggttttttttatttgtacgcgcgtttttagttttttttttgatattttttattttacgttcgtttttttttttttgtattttgttgtttgtttgagattttttgttttcgtttttgtttaggttggggtaattttgtgtgcgcgcgtgtttttttcgtattaattttttttgtatattcgaagttgaatatttttttttttagagaatttattcgtattttttgcggggtttttaagtattttttttgtttttttttttttaattttttattatagggtcgtttttagtagttttatttttcgattttgttcgggtcgagtttggtaggggtcggtggtttagcgggtttcgtattcggcgtttcgtcgtcgtcgtcgtttagttgcgtcggggcgtttttcggagatgttgtcgtggaagaagtataagttcgagttgttggtcgaggcgtcgtcgcggtaggcgtttaagtttaagggttacgttgtgagtttgtattattcggcgtttagttcgttggcgcgggcgtgtttcgaaggcgcgtttagtcgggtgggtagtatgtttcgttttaagcgtaagaagttgtatattattagcgaggatttaatttatatcgtgttttatttgggtaatgttattattatttaggcgcgcggcgacggttgtatcgattttgttgtgggtaagatttggagtaagagcgaggcgggtcgttagggtattaagatgaagttgacggtgagtgcgtagggtattcgtatggtgtacgtcgaggagcgcgcgttgcgtcgttcgggttatttttatttgttgtatcgcgttatttattgcgtggtcgacgcgcggttgtttaaggttttcgtttgggtgtatcggtacgagttgaagtataaggtcgtgatgttgcgttgttacgtcgtgttggtgtttaagttcgaaaaggcgtaggttatggttttgttgttttattagacgtcggttaacgcgttggcggaatttaaacgttttaagcggcgggacgacgcgcgttattagtagtaggagttggtgggcgtatatattatttcgttagtgtcgttgcgtaagttgtttttatacggattttgttgttataaatcgtcggtggagcgtagtcgtagcgcgtttaagtttggttttattatcgaggatttgttcggcgaatagttggagtaggagttgtaggaggaagaggaagaggagtaattcgagggttgttcggaggaggaggagaatcgtgcggtagagggagatttagtagaggaggaggtcgaggcgtagcgtgcgttagtggtcgttatgtattttgagtgcggggatttgttggatattttggagaatggtcgtggggaggcgttaggaggcggcgggggttttttgggttcgggggtcgggtcgtcgtttttgttgttgggtagcgttttcgatatgaaggttgagttgtcgtaatttattagcgatttgggcgagtttagtttcggtaacgacgtgcgtattttgtaggtcgatttgcgggtgacgcgtttgttgttaggcgatagtacgggtagcgagagttttatcgagggcgggggttttgacgttattttcgttatcgtcggggattcgtttcgttaggtcgacggcgttagtgtagacgagttttattcgggttgagttttttcgcgcgtcgtcggcgttttatcgtggttatttattcgtggtttcgataatttttttgttttttgttcgtttttaggaagggggaaatggggtatttggggtttagatttatatttggagtttaggtttagcgttttttcgatcgtttttttttatttttcggttttcgttttcgttttagtatttttggttttgttgcgcgtggggatgcg

SEQ ID NO: 823 - DNA, 1094 bp, Artificial Sequence
  Description of Artificial Sequence: Synthetic polynucleotide
gcggcggattacgatttttttttgttttttagcgttaatttgaagcgggagttggttggggagtagtcgtatcgtcgcgttttgcgtgagtcgaggttgttcggttcgcgggcgttcgggacgcggggaaggtgggattttgtgcggggggtagagggttcgcggatatttcggggaaggggttggtcggaatcgttaggggcgcggtttttttagttaaggatcggttcgcggaggcgcgttaggagcgggagagggtggcgcgttcggggcgtaggaatttagcgtagtttaggttggaagtcggggcgttgggtattatagagttcgggaatggggcgcgcggagagcggtcgttcgaggacggcgttgcggcggttgtagttcgggatttattgttttatgttttttttttttagggtgtttggatatgttgagtttttagggttagtttatttttatcgtcgatcggtcgtagttgtattgcgtagttttttttattagcgagttcgaggagtttattattatttattacgattaggtttttatcgattgttagggcggcgattttttgaaggtgaggcgtttacggttagttaatttagtcggagggcggtacgggagggttggaaagggttggggcgttgtatttagcgtggggttgttgagcgtaggtagttagtggtattttttagatatttcgttggtgttcgagtcggagaggcgcgttcgaggatttttatacggcgagaatttcgtttttattcgaagatttcgatttatatatatttagtggggttggggtcggtgtttttggacgttgttatggtttaaatttttttttgggcgttttcgaggttttaggaatttttaaagatttgaattcgtagcgcggaattttgacgtaatttagggtcgaggaaaaatgattaaaatttaataagttcgagtgttggggtttattaagcgggtcgttttggttagaaggttcgttttatacgttttatatttgagttcgtttcgtttttgttggtttacgttcggtagagtcgtttcgagagtatagaggttgtttttagtgcgcgggtgattcg

SEQ ID NO: 824 - DNA, 2168 bp, Artificial Sequence
  Description of Artificial Sequence: Synthetic polynucleotide
tcgcgttgtagttaggtagagtttcggggtagttcgtttatcgcggaggagttattttggagttttacgttttttttatattttatttatggattggaaaggatgtttagttattcgcgagtttgtttgatattgggatggaaagttatagttcgtaggttggagtgaggcgcgggaagatgtttggtttttgtttcgcggatttggtagtcgcgttttgcgggtttgtttattgaattgttgaggattcgttcgtgtgcggggattcgagtgttatttttcggagcgttattttgcgttttagtttttaggttagataatatttggaaggtagggtagggttgttttcgtttttattttttgcggaaggatggtaggattcggcgtagcgacgtagtagcgggagggtatagcgatttgtatttttagtttttttttaggatataaggttgattttatttttcggatagttgtaaagtttttgttagaattaaatcgaattcgcgtttcggagaggggtttttggggtcgtttcgttgtagggcgtggggagtggagagagggaaggggaagtttggggttgggtgtgcgcgcgtgggagcgcgtttcggagcgtttcgtatttttttattttattttcgggggtagtttgggaaggagggagtggtagtcgcgggaatgagggagtaagagaaatttttttaaagtgacgttttaaataggttcggatttagaattcgaagttaaaggttgttagaaattgggatttttcggttttttttgtagttttttttttttcgtttcgaagttcgggcggtttgttggttgtttgttttttcgttttcggtttagaggtttttggttggcgggcgtttcgtcggtcgtcggttttttttttgaaattcgtcggcgtatatgaggtcgttgttttcgtcgtaggcgttggcggttttttcgcggtgttcgtggtgatgttatgtttcgttattacgcgggaggagaggagggcggcgtcgtcgggttttgggtgaagagcggcgtagcggcggcggcggcgggcggggggcgtttgggtagcggtatgaaggatgtggagttcggtcggggtagggtgttgttgaattcggtagtcgttaggggcgacggtttgttattgttgggtattcgcgcggttacgttcggtggcggcggcggtggtttgagggagagtcgtcggggtaagtagggggttcggatgagtttgttggggaagtcgtttttttatacgagtagttagagttgtcggcgtaacgttaagtatcggcgggtgtagaattatttgtataacgtgttggagagatttcgcggttgggcgtttatttattacgttttcgtgtgagtattcgcgttttttgttatgttcgttgtaggggattattgtttttggttttttggggcgtgtttcgcgttcgcgtttttgggttttcgcgcgcgtgtatacgtggtggtttttattttttcgtacgtgttcgtggttttttttttggagtttttttttttttttagttttattttttttatttttatagtttgaatttttttttcgaggatatttaatgaattgttcggtagttttaggttttcggggcgagagttaggtagacgcgggatttaggttgcgcggataattgggagtaattaggttttaagatacgtaaattttaatcgaacggggcgttcgggagttagggaatgtaaagggaggataggcgttcgtgtgaggtttgagagtatattggagaggttaggaggtgatggcggggtaggacggggagaagtgagggggtatcgagggttaggtttttagttttaggggcggagtaggggaagttgttatttggagagagttgttaggttttaagcgcgttcggaaatacgtttcgttattatttagttattattaacggaaaatttgttagtgtatgtagttttttttgttacggagaaggtggttaaggtttagaggaggttagtaggttaggcgaagtaacgttttcgcgttgtagggggcggggaggtagcggggaatttggggcgtaggaacgcgggcggaggtgcgatagtagaagcgtaaatgggtcgtttttgatagagatcgggtagtgggttaagttttcgtttgtggcgcg

SEQ ID NO: 825 - DNA, 1204 bp, Artificial Sequence
  Description of Artificial Sequence: Synthetic polynucleotide
tcgcgcgttttattttgagtaaattcggagtttagagggttgtagaaatacgttcgttaggcgttttttgttttagaagaggaggtcgtatggatgcgttttttttttagagattttttcgttatagtcgtttcgtaagttaagattagagaattttttttttgggtggggtagggggacgttttcggttaaagtttggattgcggtttggcgtttcggtagttattcggatgttcgcgaggatcgtggtttgtttggtataagagttttattgttttttagttcggagtttgttggggatcggtaatttgggcggtgttggaagtgttttttgaattttttagtttttatttattttttgtaatttttttgtaagtttaattgatttttgatatatcgtattggaggcggggtgtgtgtgtgggtaaatttcgtgtgtggtgggtgatattgcgaagtgttggtattgcggtcgttttcgtttttaggtggtcgcggtcggaaggtgggttatttcgtatttttgcggtcggggatcgattttttttcgcgcggcggtcgttatatttacgggattcgaggcgggattttttttatcgatttgaaacgttttgtttatagtaggatttttttgtcgaattgcgaaggtttgcgttgcgtggggattcggtgaattttttttgtagcgaaagtaatttagatggacgcgggaattgacgtatcggtatagaggattagcgcgtttttaagtcgattttcgggtcggtttttcgttgttttttcgtaatttttttttttttaggattttttcgtcggagttttggtttatcgtgattttggggtttagaattgttgggggtttcgtcgttggagtagtaggggagatttcggggcggaagagtcggtgcgggtcgtcgcgtggtttcgagaggcgtttcggggtcgtagcggattgttagttcgcggttaaggcgtagtaggttttcgatcgttttgagtatgttgttcgtttgtttcgcgtcgtattcgtattttcggatttagttataggcgttgttttcgtagtttttttcgtttcgtttcggtttgtcgcgcgttggagagtttgggacgtgtagttggaatttttggcgttcgtatatttagttcgttattttcgttttcgttttcggttagcgattcgggattagggcgttaagtttcg

SEQ ID NO: 826 - DNA, 1770 bp, Artificial Sequence
  Description of Artificial Sequence: Synthetic polynucleotide
cgttaacgttttgaatttattacgtagattttagtattggaggcgtcggcgatcggtattcgtttttttcggtatgggcgtttcggaataattgggcgtcgtcggtttatattttgttcgtaatgttttgtattttgttgggtttgttttaggtttttagtttttttttcgttgtttttagttaggaagagttcgagaggcgattggagcgttaggttggagaagtgggtttttttcgtttgttaggttgtcgttgcgattttattttttcggtaaggggtcgaagttttcgggcggggcggggcggaggatagtacgaggtttaggatttttacgttatttttgtagtttcgcgtttttttttttagttttggtcgggttttcgcgttttttcgattttcgatcgtaaagtcggggtgcgagagggaaagggaagtgaggcggtacgcgtatggagggtgtgagtgcggatatatatatagggtggttaggtacgaaaaatttcgttttttttcgaattttcgtttcggattagttgtagttttattattttagggttttttgcgtcgggataaagttgtcgcggtttttttgcgttcgcggagcgcgtcgtcgttcgatttttttagtttttttcggtcgtaatttcgttttaaaggattcgtgggtcgttttagggacggaggggattcggagtcgggcgttcgtagttttcgtttttcgcgttttcgttcggcgtcgtcgtttatttgtttagtattttgcggattttttggcgtacgttagttcgggaggaggcggataggttttcgtcgtcgtcgttgttttcggtcggtaggttttcgatggtggttattatatggttcggcggggttggcgacggcggttgtagttgttgttgcggttgtttaggggggattatcgcggtagaggttgaggcgcggcggcgattagaacgtagtcgggtgtatcgtgtgtcggtttcgggttcgggaacgcgtagaggattcggtcgggcggtcgcggttcgggaggcggtgttgtttgcgaagcggtgaggcggggaggtattcgcggttacggtcgtcgtcgtttagttcgttatttatttttttttagttttagtgcgcgtattttcgcgttcgtgtcgtcgtcgtcgtcgttcgtttcggtttttttcgagtcgcgtttttaagttttggttcgtttcgcgaagtggttgcgaagggtgtcgcgcgggggcgcggagttgtcggtcggtttcggggaaggagttttgatttttttttgttttttcgtgttcgggttttttcggggcgcgcggcggtagttgtgttggcgtcgttttagtttgtgtttcgttcggtcggaaagttatcgtttgtgttttacggagtgagagatcgagggtgaattcggagagtcgggcgggggcgtcggcggcggcggcggcggcggcggcggcggcggtagagcggggcgcgggcgggggatttgcgcgtttttttttcgttagagggcgttgtcgaggtgttttgttgttttcgattttttattgtttcgttcgtagaggtttacggtttaggttgtggtgattgttttggtttgggtgttttttagggggataagggggttgggaatagattttttttgtggagttggcggggatttttcgtttttgtttaagcgtcgcggaatttagtattatcggtttgggatagcggtaggacgtcgagataggtgtcggtttcggattagaaatttaaacgg

SEQ ID NO: 827 - DNA, 1834 bp, Artificial Sequence
  Description of Artificial Sequence: Synthetic polynucleotide
cggattcggcggaaaggagtttcggaggggaattgagtgtttttagttaggtacgttcggggagatagcgatgttcggggagatcgcgatgttttgggggatcgcgatgttcggggagatcgcgatgttcggggaggtcgcgatgttcgggtagatcgcgatgttttgggggatcgcgatgttcggggagatcgcgatgttcggggaggtcgcgatgttttgggggatcgcgatgttcggggagatcgcgatgttcggggaggtcgcgatgttcgggtagatcgcgatattcggggagatcgcgttggtttatttagaagttttttggtttatggggtaagtagtagtcgtaggaagcggattcggaggaaaggagtcgcggaggggaattgagtgtttttagtcgggtatgttcggcgagatcgcgatgttcggggagatcgtaatgtttcgggggatcgtaatgtacggggagacggcgatgttcgggggtatcgcgatgttcggggggatcgcgatgttcggggagatcgcgttattcggggggacggcgatgttcgggggggattacgatgttcggagggatcgcgatgttggggtagaacgcgatgttcgggggtatcgcgtcggtgttattagaagttttttggtttgcggggtaagtagtagtcgtaggaattagattcggcggaaaggagtcgcggaggggaattgagtgtttttagtcgggtatgttcggcgagatcgcgatgttcggtgagatggtaatgttcggggagatcgcgattttcggggagatcgcgatgttcggggagatcgcgttgttcggagagagggcgatgttcggagaggtcgcgatgttcggggagattacgatgttcggggagatagtatcggtttttttagaaattttttggtttgaggggtaagtagtagtcgtaggaagcggattcggcggaaaggagttatcgaggggaattgagtgtttttagttgggtatgtttggggagattacgatgttcggggagatcgcgatgttcggggagatagcgatgttcgggggtatcgcgatgttcggggagatcgcgacgttcggagggatcgcgacgttcggggagatcgcgatgttcgtttagggagatcgcgtcggtttttttagaagtttttttttttttgaaattcgttgtagtttataattttttaggtttggttttcgttttgtttaggttatattttcgaatttatcgatttattttgttcgggattagttagatagtaggtgtagaagcgggaggtatagaaggaacgcggggttggcggtcgttgttattgtagatttggagtttcgtggataggaggcgttgatggtttttttcgaggtttatattacggttgtttataaagttgtttagttcggttcgtcgcgcgtagggatatattgggcgggattttaggtatgtatttttttggggatgttttatttcgttacgtttcgggttcgttatttgatagcggtttggttgacgtaattttttttttcgattcgttttcgcggtttggtggcggcgtgcgcgggtttcgagcgggttaggacgtcgtttttttcgttttttttatggttttattaaataattttttaatatagtatttattattattttagtgtaaatattgatgtataggaagatgaagaaatttgtataggaatatttagtggcggcggtgtttttttgttatcgtttgcgttagcgatattcgtttttttttcgtttgtagtcgcgaagttttcgttttttttcgtttagggcgtagtcgtttttttatttcggagcga

SEQ ID NO: 828 - DNA, 950 bp, Artificial Sequence
  Description of Artificial Sequence: Synthetic polynucleotide
cgggttttcgggtttgtttttcgtacggacggtaagtgggtggagagtacgttttttttagttgttcggcgagagaatttgattttgaacgtagcgcgggttgtacgtagaattttcgggttgggtcgcgcgtttcgggttttttgcgcgtattttcgggtcgcgcgtttcgcggttttcgtagttttttaggttttttttttttttttttttttttttttttttttgtcgggcgcggcggttatttcgacgggcggcgcgggcgcgggtatttgtagaatgtcggcgggtcggtttcgcgtatcgtgtagtcgttgggttcgttttttaggtagtagggtatttgttggtcgtggggttgtaggaaaggcgatagttgcggcggcgggtgtagtagtattagcgggttcggagatacgttgttgagtggggggaaattttttaggtcgttggagtcgaacgtcgtagttttagattcggggtcgtaggggaggtcggtttgatcgtagatttgcgcgttggcggcggtcgcggcgttgaattcgtaggcggcgttttcggggtagttgtatacggcgggtttgttgttgtttaggtatatttcgtttaggggtcgttttagggggattttgagttgcggacggtttaggggttttagttcgtttttttggatttgatgtagtagggttattttagatgttttggtgtggagggttatggttatggttcgtggtcgcgggtagggtgtagatcgtgttttcgtagggtagaaggtttagaaatcggcgggttatttggaaaaagagtatagttcgaggttagaggcgacgtagcgtatgtttcgtcgatacgcgagttttggtttcggttttgtttcgggagtttgcgggttcggtgaagtcgggcgattcgacgggagtaagtgtagttttaggacgaacgtttttcgt

SEQ ID NO: 829 - DNA, 1218 bp, Artificial Sequence
  Description of Artificial Sequence: Synthetic polynucleotide
cggatttacgtcggttttgttacgtgttgttcgtagttttcgttcgtttttttcgcgttggtaacgggtattgattgttcgatattttagcgatcgtagagatttttttaatgtcgggcgtattatcggcgggttagcggtttcgttggtttttttgatatattttttatagttattttttttagttgagatttttttttttaatatttcgttaattaacgtgtaattttttggttaaaatgttagagttaagattaaatttgaagaaaagaatgaaattataggaagttttttagatttagtcgttagtaaggttatggttcgaagcggtgtaggggcggcgcgtcgggaagttattggtagagttgtgcgtattggggggtgttgtaagcgttggggagagtgtggagaggttgcgtggagttgcgcgttcggggtgggagttgtatttttaatgaagcgcgtgaagggtaagcggtgatgggttttgcgttagtggggttgggagcgtgttgggggttgtacgtggggttgcgcgtaaggtgagaattgcgtatgtgggtttggggattgcgcgtatcgaaggttgtaggcgttggggagggtgttgggggttgtgcgtggggttgtttttatcggaagttgtacgttcggggaagcgtagaggcggggtgttgcgcgcgttggggagtacgtggggggatacgtagggggatacgtagggattgttcgcgcgaatggtttcgaacgtatgcgttttattttatattttatagtcgttatgacgatcgggaggttcgttcgttaacggttagttaacggttgcggggataagttcgttgaggttgttaggcgagttaggtttttttggatttcgtttgattcggatgggttgtgtttgaaattgatttagttttattagggattatgaagaaataaggagtaaatttaaagtcgttgtaattttttcgttttagttcgtttaagcggtcgtacggggtttttttcgttcgggagttggaggtggaaaagtcggttttaggcggcgggaaattgttagggggcgttaggaggtttttttcggggaggattttaaatttgaaaaagcgaaaaggtttggagttaaaggtggtggttaagatttttttcgattttttttagttcgttcgtaattttttggcgtagtttcgggaagaggtgtacgaattgtaggcgcgg

SEQ ID NO: 830 - DNA, 795 bp, Artificial Sequence
  Description of Artificial Sequence: Synthetic polynucleotide
cgggcggaggcgtagagttttaattttttattaggcgattagtcgtggaaagcgggcgggttttttagcggtaatagcgattattatttttcgagaagacgcggttagtaggacgtagggggaggcggtggtagcgcgtttttgtttcgcgtttcgtgcggggtttttgttgtcgatagttgttgttttgatagaggcggcggcggcgatagtatagagtacggaggggattcggcgagttagtttatatgttgttttgacgaggtggttgtttaatcgcgggttagcgatatatttatttaaggataatttttagggtttattagggaattaggaattttttcgttttttttttttcgttttttgttttcgcgtttggcgtttgttcgggggatgtttaggcgcgggtatttatcgttcggtcgggggcgttttgggttgttggttgtagtgtgaagatttagtagtagtcgtcgttatcgtcgttgttttgtggggagagtggcggggagtttttgggagcgttaaagcgttgttttcgttgtagtcgggagagggcggaggaggagacgggcgggtcggggtgaggatagggagttggggacgcggcgatttgtgtttgaggagggtagttagcgtttttgttgggagttgtgggttcggggttgtttaggaggtttaggtgtgttgtggggcgaggttaggaggtgatagttgtcgttgtagtcgcggggggttttcggggttgtaggattcgttttttttatttttcggttttagtcgtttagtttttcg

SEQ ID NO: 831 - DNA, 686 bp, Artificial Sequence
  Description of Artificial Sequence: Synthetic polynucleotide
cggtttatttttcgatttcggggatcgaggggttggaaggtggggagacgttcgaattttatttgtgatcgtgagtttggtgttcggttcgaagtattgttcgtaggagtacggaggtgtattttcgtatgtaaatttttaaggtttttcgagtttttgtttattttggggatttagtttaggttttttagtatagggtcggatcgggtgtcgcgaagtagtcgtcgttttttatttgaatttcgtcgttcgggtggtttcgcgaaaatttatttagtacggttagtttgttgtcggtttcgaaagttaggacgttggttttagagtatagttcggggatttttcgtaaaaattagatttaagtcgttcgcgttcgcgttttagtagttcgcgtttatcgagtattaggagtcgcgtgtttggttcgaagtattgggttttttggttacggttttcgagtttcgtataaaaattcgagcgtagtttcgttttcggtttttcggcggttttagtttatttagtattgagagtcgggtttcggcgtcgaagtattgaatgtttttggtttatagtttcgagacgcggtatagaaattggttttgcgacgttttcggcgtttcggggcgttttttttttagtttcggggttttagcgggagttttcgtttatcgagtattgttagtcgg

SEQ ID NO: 832 - DNA, 1565 bp, Artificial Sequence
  Description of Artificial Sequence: Synthetic polynucleotide
cgtttttagcgaagtcggcgtcggaattgttttaatggaaattagtcgtcgggcgtttcgggagggtttaggtcgatttcggggtttattagaggcgttttaggtcgagggagttcgcggcggttggaaggtgaatttgatatttcggttttatcgatttcgtagcggttcgtattttatttttatttcggttagattaaagtagaattttgggtgtgcgcgtgattttttagggagggcggattcggggttttttttgtcgtattttttattgggggatcgtttttaagttttcgagagtttttcgggtagagtttttagggtttagagtatgggaggatttggtttgtttggtggaggcgagtagtcgaggggtcggtggagttgcgttttaaatgagttttcggcgcgcgatttttttcgatttcgattttttgttcgtttttttttttttcgtttcggtttttggtttaggggatttaggcggcggcggcggaggtggtagaggttagagtttagaggcgtagttcgggtagttaggagggtcgtacgtggagtcgtttttcggattcgtatagcgacgaaggggggaggttgtaggcgcgcggggtgggggttggggcgtagttcgagaagtgggaggggatcgggtgaggggtggtttttgaggaggagttaggttggatcgtattgtttcgcgttcggtcggggagggcgcggggcgttcggtttttcgtgttttttttttcgttttagtttcgtgggcgcgagaggaggcggggggttttttgtgtattagagacgtagttgttttgttcgttcggtggggtgtggatttttcgagcggtgttgggaagggggttttttttgttcgcgcgtttaggattttatttagggcggaggtttcgagtgggtcgtttttcgtagcgttttgggttcgcgggtttagaggttggaggtagcggggagttagggttttttatttttttttcgtcgcgtgttttcgtaggagtcgggtttttcgtttttcgcgatggtcgcgggtcgtagtcgtacggagtcgtcgcgcggatttcggggcgtttttttttagcggggcgtagtttttttttgtttttcgttttgttagcgggatggggggcggcgggtcggttttgagggtttgcgtcgattatcgcgggggtattaattggttgagtttgagtttcgacgggtagcgtttgttgacgggtagcgaggacggtacggttcggttttggagtatcgcggacggttagtgttgcgcgtttttgtaaggtagatttttttattttttttttgattttttcgtcgtagtttatcggttttagatcgcggattttagtttttgcgttcgtagatttttttttagaagtttagttttcgtttatttcggtatattagcggaagagcgtttgtttgggtttagtatttggttgttgagcgtacggtagggtagggtgaggtttgggggtggggtgcgggtgtagagtagggtgcggtcgggatcgggtgggtgggtcgaggggcgttcgttataaaggcga

SEQ ID NO: 833 - DNA, 1911 bp, Artificial Sequence
  Description of Artificial Sequence: Synthetic polynucleotide
cgttttacgggatggagagggagtgggtgggcggtagttttcgagtcggggatttcggttggtttttgtgcggcgtgacggggtggttggttgagttttaggtttttttcgtttgtcgtaggttgggttggcgttgcggatttaagtgtagttttttttcgcggggtacgggcgtaggcggcgtttttagggaggcgtgcgcgggagcgtcggggatgggggacgggcggggttggagcggggatttatttttttttttgttttaagaggatttaaaggaaaataatttatttgattttggatacgtttttatttataattcggaaatatgtaaatgaaaggtttatatggtttgaaaggggtaaattaagtttttagcgtgcggcgcggggaatcggtttttttttagggagtttcggaggcgcgcgttttacgtcgagggcgttcggggaggaatcgtatttcgggttcgggagtagcgcgttcgggtttttagcggttatcgttcgggggttttttaagttcggtttttgttttttgtcgttcgttttttaggtcgagttttcgttttcgcgatgtcgtcgcgttcgtcgtcgttaggcgcgttggttcgtcgggtcgttcgggcgcggggcgcgtcgttcgtcgtagtttttttttttttttcggtttggttttgcggttcgtagcggggttcggggtagagcggtcgttttgttttcgtcgttcgacggcgcggggttttgtaaaggcggaagttcggcgttcgttatgatttcgtgcggacgtttagtgcgtttagtttcgtcgcgtcggtcgggttttcgggttttttcgcgttgagcgttcgaattcgtttttttcgcggtcgtttatcgttcgtcgtcgtcgtagtacgagtcgttttttcgttttcgttttttcgtttcgtcgtcgtcgtcgtcgtaggagagggagggaggcggagggagggaggcggcgggttttgtttagagttcgtttcgggcgtcggtaagcgagtttcggtcgcggcggtagcgttatttcgggtcgcgggtagtcgtttttcgtttttcgcgttcggaattgttttcgttttttcgcgatttcgtagtagtcggttttcggggcgttacgaacgttgttttttttgtggagtagagattttttttttttttttagggggtgtcgtttcggggatcgttgagcgttaggggtttaggaggcggggacgggagcgtcgtgattcgttatggtttaagcggttaaatagttgaagaaaattaaagatatcgaggcgtaggttttttaggagtagaaggagaaggaggaatttaataggaagcggagaaatcgttttcgtgatcgaaagaagaaggtaggagggggcggcggtgaaagtttagcgatcgcggtatttgtaagtggttgttgggggtaggggtcgggcggttcgggacgcggtggggcgcggcgttcggtgcggcggagttggcggtattcgagcggggaaggttcggtgggcgtagaggagggacggaggtttttgcgcggtcgggaaggggatagggcggtaggttggaagggtagagcgggtggtcgggaggttgagggcgcgtagaattttttcgttagttgttcgtagagattttttagtattttggatagtattcggtaggttcgcgttgttttaggattaattttttcggttttggttgtcggttgcgggtggtgggttgttttgttcgggcgcgtcgtattcgttggttttttaggagagttggtttgggtaaacgcggttgtaggtttcggggagcgggtcgggggggggtagttttgttcggtttttttttaggtgatttattttgacgaagagagcgttttttttaggtgtttttgaacgagagtcgg

SEQ ID NO: 834 - DNA, 2213 bp, Artificial Sequence
  Description of Artificial Sequence: Synthetic polynucleotide
cgaaggcgacgggtttaggatttgtagaaatcgttgcggtttggggcggtcggggatttacggttttttggggcggttttgaataggttttggggcgtagcgttcgttttttaaagaagtttgggatcgggttttgtttcgttgtaagttacgtttttcgtgagtttataagtgtaaaattagaaaagaatgtttcgtttaaataattaaagagcggtggttttcgcgggggtagcggaggcggttagtagggttttcgttttcggggagaagtgtttacgatttaagggttgtttgttttaggaattttttaaagaattatagatattgagagtattcggggtttggtaggaagtgtagtgtattttttagttttagggtaattaggatagtatgaattttttattttgtggtagaataaacggttagcgtttcgatgtggcgcgttcgatttttttttatagagtttaaaagttacgtttaattaaattgtagcgttttcgttttagttgggtatcggtttggaagcggtttggaattagattggattcgaggaggtaagatttcggtagcgcgaggttaattataggttttattcgcggtttttagttcggttttatcgtagtcggcggtagatattttaaattttttatacgtcgtttttagcgaggcgtttcggggaaagtagcgtgaggtagtgagtcgaggggcggggttaggaggacgtttcgttttcgagttcgtttcgtcggagggtttgattaatgattttttaagtcgttttagttttcggcgtagttttttcggtgggttaggtttttcgttcgatttgttttagtcggtcggagtatatacgtttggtcgcggggcgttcgtataaaagttatagttagcggaggttggaaatagtcgtcgatttgggtatcggtcggacgaggatggagtgattagcgcggttttggttatataggttttgttttacgtttttcgttcgtttttacgacggagcggagttttatttagtcgttttaggaaaggtgaggggttcgttagacgcgtattgcgtagttttcgggttcggaacggtggcgggtgtcgtatttcgaggtgaggttaagggtttttcgtttttcgggtagaaattttttttggcgtgaaaggtcgagggcggttggtgagtcgtggtttttcgcggcgtcggcgagaaggagtcgcgttatttttcgtgcgtgtcgggttggataaagttatttaagcgcgaacgagtgttgattttgagttgtgttttcgagattttttttttcgggtagagtagattttttgtttaatttgtttttgaaaagtaaagtcggtattgcgtttttttttatttttttaggaagtttaagaatttcggagtttcgtaattttttttagacgttcggaagtaaatcgcgttttaggtaaaacgagttcgtttgagagcgtttttagtttcgttgggttgttggtgggcgtacggggagaattagggggttgcgtttttcgggttaagttcgatcgtttttcggttttatcgtattttcggttttttgtagcgcgcgcggcgcgggaagttgttatggatcgcggtcgtttagcgggtagtttttttagcgttagcgtcgagttcgcgtttttggtcgtcgttattcgcgattcgcgtttcgggcggatcgggtcggggtcggcgggttttgggggcggttcgcgtttcgggagcgggcggtcggcggcggcgaatgcggcgcgggagcgtagtcgggtgtagattttgcggtacgtttttttggagttgtagcgtacgttgtcgttcgtgtcgttcgatattaagttgtttaagttggacgtgttgttgttggttattatttatatcgcgtattttattcgtagtttgtaggacgacgtcgaggcgtcggcggacgtcgggttgggcgttttgcgcggcgatggttatttgtattcggttaaggtaagcgggcggggcgtatcgcggggttggggtcgagattaggatattttgatttgttttgttagttatcgttttgggtagatgttttaattttttttcgggtgaggcgggaagtcgatcgggagaacgatttcggttcgcgagggtattggtggtaaggttttcgtcgcgaaagtcggttttttcgcggtttataggtggttggagaggcgtttaaagtcgg

SEQ ID NO: 835 - DNA, 1247 bp, Artificial Sequence
  Description of Artificial Sequence: Synthetic polynucleotide
cggggggtaggtcgcgagagggagaggatttcgggagtagacgaagaagtggagtagttaaagtttgcgttagaagaggttggggattgcgagaggagaggttggggtttgtaggggagcgtagtagtttttagtatcgatttaaattttaaagattcgtggtttttgtttgatttcgagggtcgggaatagacgtttgtttttgtggagagcgatatttaatcgagaaaatggggttgtttcgagttgggttttgcgtttggtttagggcgaggtttttttggtttcgggttggtttttgaggggcgtaaacggtaggtttggcggttggggtcgaggagggagggtattatcgtttcgaggtagtacgtagtttgtagtagaggcgtttgttttaagttgttttttgggggcgtcgtcgtcgtttttttttttcggggtcgttcgtttttaggaaagtggaggcggttggcgaggatcgagagtcggggtcgcgttgcggagggattatattttcgggagttcgagggggattttggcgcggcgggttagtttttgtttttcggttacgggtcggtagcgttcgttttttttcggttagcgtttgcggttcgcgtcgcgcgtatcgttcggtaatttcgcgcgcgtttcgcgggggcgttgcgtttttttgttatatcggcgtatcgcggttttttttttttatattttcggttcgtattattcggttttttttttattttttttattttttttttgttttttttttttattttttttttttcggcgaggggcgggagggggcgtggcggggtcggggtttgtgtggttgggattcggtttttcgtatttcgagttcgttcgaggagtcgggtttcggtcgttgtttagtcgtttcgtgtttcgcgcgttttgcgtcgtcgttatcgttttttggggagacgtagttatttgttcgttatggatatttttagggttttgttttcggtcgttttttttattagttttttgtgggatttgttcggtttttagtaggtttttattttatttttttcgtcgttcgtcgagttgggttttattaagggtatgcgaagtcgtaaggaaggtaagatgtagcgggcgtcgcgcgatagtgacgcgggtcgggagggttaggaattatagtcgcggttttaggacgaatttcgggtttagtagtttcgggcgtaggagtcgttaggtaggggttcgcgcgtggtgttttacga

SEQ ID NO: 836 - DNA, 1861 bp, Artificial Sequence
  Description of Artificial Sequence: Synthetic polynucleotide
cgtttattgggcgacgtggggaaataagttttagttttcgaagcgcgattaaaaggagaaattaagtttttatcgttagggcgggggagggaagttgggtgtcggtaggcgtttcgtcggagacgagatttttttcggttttagaagcgtttcgttagggttagagagggcgagcgtggcgggagggaagtttttgttttttagcggttaggcgattcgaagtcgagcgtcgtgttatacgtatttcgtttcgttttgtttgcggtattttcgtgtaatttttatgaaaatgttttttcgtttttgacgtttcgcggtgtaatttttattttttaacgaggagggggtcgtcgtaggattgggaatttagtggtcggcgttttagtattttcggacgcgtttcgtgttttttttagtatttttttgagggatcgtttattgcgattttacgtagtgtcggttatttcgttttagtcgtagggagtattaaataaaagaatttttgtaaatttttttttttggatattcgcgggttttttaaatttggtttttatttttttagaatttgtatgtagttaaataggaaagttggcgcgggggggatggtgtgcggaggaagggatttcgaagtttttaggttatttttggtttcgaggagcgcgcggagtggagtcgttttttcgcgggttcgatttaggttttttttttttgttattttttttttttcgttttttttagattacgtagtaagattcgtcgagggcgaagaagttgggagtgattttaggggtttttgcggttagattaaatcgtaattttcggtgtttttattttcgcggatcgcggggtaacgttagcgagtagcgtttttttgaggaagggaagagggggaaagggtgatcggacgagcgtatttgttttagcggattttcggtgtatatttggggattgggggttttttaggtggcgtttttttattttttgcgggtttttttcgtagttttaaatattttaaacggcgcgcgtatttttcgtttggtttatttatcgatttcgtcgatacgtaggttattaagtttaaggtgagtaggatttacgcgcgtcgtatattttttagggatcggttgtttttagtcgttgtttgtaattagggtaaaacgaagttttttgtttagcgttcggcgtagttcgcgtatacgaattcggagtagagtatcgtagcgattgcggtttaggttcggggattcgggttcggggttcgggggcgttcgttttttttttttgcgtttgttttcgtcgttcgtagttgcgtttcgggaacgcggcgtttttttatttgttggtttttgtattttcgatacggagttggtgtttcgggaaggttgttttttgaagttttttttgttttgttgtggttttgttttttcgcggatttttttttcgtgtcgaggtttagtttttggttttaaggaataaattcgttggtttgaaagggagttacggtagaagtttaggggtagagcggcgggagcgcgcgattcgcgcggttggagtttcgggggtatttggagagtagcgcgtttaagcggggttattggtttcgcggttgcgtttttttttttttcgcgtcgcgttttttttttcgggttttttttttttttttttttttttttttttttggtttttttttttttgagtttgttttttcgggtttttttgggcgattggggagaggaggcggtagtgtgatttttagataaattcgggagaaatttttataggattatacgtcgattggtagtttcgaggattagtgggcgtcgcggtttcgcgttgtggttgcgtcggttttgtttatcgg

SEQ ID NO: 837 - DNA, 3378 bp, Artificial Sequence
  Description of Artificial Sequence: Synthetic polynucleotide
cgggtcgggtcggcgaggggggtttcggtcgagacgcgaggcgcgttacgggattcggcggcgggagcggacggcgagcgagcgagcgagcgggcgggcgggcgggcgggagggaggtggcggtcggggttgtttaagatggggtcggagtcgcgggttaggcgcggaggagacggaaggggcgggtagggtcgcgcgggcgcggtgcgggcgttttttttcggtagttagcggtagcgcgtcggtttttcgtttttcgttattgcggtttcgcgtcggtcgtttgggtttggagtttcgcggcgttttcggaggacgggtttcgcgttttacgatttattttcggaggcggggtcgggtcgatcgggggcggaggacgtcgtaggaggttgttcggatttcgggcgtttgttaggttttttttggggttttttatgttaggtttcgcggttgtgttcgtaagcgtagatggtttcgggattcgggttattttgacgtcgtagatttagtacgttgcggatcgggtacgttggatttcgggataagtgcggagggtcgggggttggaagggattcgagagtagagttcgcgtttttattttacggacgcggttatcgaggttcgagaggggtcggagtttgcgggagagggaagggttttcgagggttttataatttggttgcgttttttttttagttcgggattcggatgagtgttgtttgaggtcgaggcgacgaatcgttttttattcgtttttgcgcgggatttcggtaggaataagcgttcgtttttgggatcggaggcggtaaattttaggttcgagttttttagcgtagcgtttattcgcggagtcgcgcgtttttttggcgtatttttgggtttcgcggttcggtttttagtcgtcgggtttttcgggttagttttttgttttttagatcgaggcgtaataagtttgaaagtagcgttaaggagtagttagcgagtcgaagggagggcgtggggcgtcgggcgtttcgggattttcgaacgcgcgtaacgttcgttttcggggatcgggcgcgggcggtaggcgagcgggattgattcggcgggttgcgtatatttttttttaaggtttcgattgtgcgcggacgggggcgcgtttaggaattttcgttttttttttcgtttgtttgattttgttgggtatttaaagtcggattcggcggtatttcggcgtgcgggcgtagagtttcgttgtcgtttacgggagggagcggttcgatttttttcgttgttttttcggtagtcggggtcgtagacgagtggaaggtatgagggttttaggagacgtgatagtcgtttttttagattttatatatcgtatattattttttttttagatagaaaagggatttagtttttttttttttcgttttcgttcgcgcggtttttgttgttttttcgcggcggttttcgtttcgagggggcgtgtgtttgtgtttgtggggagagtatcgagggttttcgtgggtttttaggatggagcgggagagtagattttttagttttttttttaatataaacgataagcggtttttttggggcgggagtgtaggttttttattcgtttatacgtttttttgttttttaattatttcggagttgtagtttaggaatttgcgttttagattcggaggaagaacggggaggtcgcggcggggacgggtgttgaaagagggttggtttagggtttttcgggttttagtttaggcgtttgcgttttaagaaatttagaagtttaaaataaaagtggaaaggggtaaggtgtttagcggtttggggttggggtgttagattaggcgttttttttaggttgtcggggagtggttaagtaggagtcgtcgcggttaggaggagggacgcgggttcggagtcgtagttttcgttaagttttttcggtcgtatcgtttcgcggtgatttttagtttcgtcgttttttttcgaggtcggaggagttttttatttcgtttagggggtcgcggggatttagggagagggtttttggtcgggtttagagtttttagtttttttaggagggggcgggggtcgtgttcgtttttcgaggtagtttcgcgcggttttaagttagcgcggcgacggtggagggtcggcggtttttgtttatcggcgacgcggattcgggagtgttcggcgttcgggagtgttcggcgtttggagcggagacggtatagggtcggtttaaagttgagagcggtttattcgcgcggtttgttcgatttagtggaaaggtagataaggagggaagagttaggcgttcgcgtgggggtggggggcgtaaaaatagtttttcgttcgaagtgggggagagtatttttagggagtttttattgttaatgttaggtttataggcgagggtttttacgagcgagggtttcgagaaggagtttggggtttttttttgtttgtttcgagttttgtgcgtggggggaggacgtttcgggtttttataatgtttgtagggggttttggacgtgattagtaggagggggatacgttcgggggtttttcggagtttgttgcgtttatgtgtggttgttgggggttatggggggtttttttagattttcgttagcgtttgtgtgtgttgggggtatagcgggaacgttttttttagtttgttttgtgtatgtgatgaagaggggtgttaggttgtggtgtgtggatggggaggaggcggcggcgtcgaggagttttttttgcgtttagggtcgttttttttttagtttgtttaatgcgggttcgcggggatttgttatattttatcgttatcgttggagaaggtagggggttgagggggtagggggtgggggtttaaatttttgagttttgagcgtaaaatttcggagttgcgaagttttaaacggcgaagttaggaagtttgggcgttcgtttttttttcgatttttttttattttcgttgcgtttttattcgtcgcgtttttagtttttcgtcggagttttttttattttttttagtagtagcggtttcgtcggcgaggattcgattcggcgagttgtaaattttcgcgagcgtttcgcgtcgtcggcggttgagtcgggcgttcgatcggaggtggggggggtttttttagtcgtcgtcgttttcggttcgttttgggtttcgtcgggacgttttttggagagtattcgtcggcgtacgtaggttttttttcgttttttcgcgtttgttggagtttttcgggcgttcggagggttcggatgttcgcgttgcggacgatgttggcgcgcgggttcgggtcgggttaggacgcggcgcggtcgtttgtgttttcggtttttcggtttcgcgttcgt

SEQ ID NO: 838 - DNA, 1646 bp, Artificial Sequence
  Description of Artificial Sequence: Synthetic polynucleotide
cggttgtagaagcgggtgatagtgaggagcggggtgtagtcgtcggggtttacgaaggttaagtttttgataaataaaatgtttataatgttgtgtcgttggttattttcgtatattgggatgcgagtgtagtcgttgcgtaggatttcggagatagtggcgaagtcgagtatcgcgtttgagcgtagtatgaagtagttttttaggggggttagtattttttttataattttggtgcgtagttttagggtattttgtatgatgttgagttttttttttattaggttattgtaggggtttgcggttcgtaacgtttttagtaatttttttcgcgtgtagaaggtgtttattttttggcgtagcgtttagtttagtaggcggtttagcgggtagtatacggggaaggcggttgttattagaagtcgggttaggtatacgttgtgcgaggcgatggttagttcgtgtcgcgaatatattgagtaggggtagatttcggcgtttaggaatatcgcgtcggtgtatacgagcgtcggtagttacgggaagtggatttttttttcgttgtagtttttttcggtgttttcgaagttcggcggtagcgaggtgtatagttagttagttagggtcgcgttggtttcggtttggtttaggagtagggtgtagagtagatgggtttttttgtcgcgaacggtttgtacgcggcgcgtttgtttttgttcggcggtcgagtcgttgtttcgtagtattcgtaattttatcgggtttagcgatagtaggtttaggcgtaggtcgttgaatagggtcgataaggttagtagtaggagcgtttcgagcgttcgtagttacgtagggggtagtaggttttcgtttgggtcgtataatcgcgggcgaacgcgtagtaggaagtcgtcggcggcgtcgtggtggtgttacgcgcgtttattttaggcgtagagtgaaaagagtttttcgttatcgttcgcgtcgtttcgtttcgtttcgtttttgcgtagttttcgtattcgtatttggattagggtcgagtttgttacgttttcgggacgtaagggttttaggatttttacgttcgatgtttagtcgttttgttttttgtagcgttgcggtttcggggggcgagtggggatcgcgttgggggttacgtcgttatcgttcgggggtttttcgatgaatacgagtcgcggagtttagtcgtcggtgttattttttttcgagttgagggtcggtgagggtatcggtgcggcggtggtcggcggttttggttggaaatagatacgtaggaggaagttggtgttttcggcggcgcgtagggtgtttttttttagggatacgcggtttttagtagtgttttcgggtcgtaggtttagtagttaggcggcggcggtcgggggtcgaggagatagggaaaagaagagtaggagtatagcgtttcggttgtagtagtttcggagtttgatatttatcgttgttgtcgtcgtcgcggtcgtcgttattttgtatttagcgtagttgtacgtgatattgtaggaagtcgagcgagagttggagggaggaggagtcggagttgggaatttagtcgtaggtaggttattacgtgtacgtttattgcgcgcgtgggttggtggcgg

SEQ ID NO: 839 - DNA, 3723 bp, Artificial Sequence
  Description of Artificial Sequence: Synthetic polynucleotide
cggggggcgttcgggggtgttcggtttagtagtaggtacgtagggttttgcggaagacgttgcggaattcggcgttgaagatagtgtagatgacggggttgagggcgttgttgacgtagtttagttaggtgacggcgttgattagtcgcgggggtacggagtaggtaggatatagcgtttgcgtgatgtgtattacgaagaagggcgtttagtatagtaggaaggtttttgggggcgtcgagagtcgcgttagcgtttttcgtttagtcggtttcgtatttttttttttttttttttttcgttttttaggataggaatttatcgattattatcggtaggatttttatggttttgcgttttcggtcggtgattttggtacgtcgttttttgcgggtttgcggtggagtttggggtgggagcgcggcggttttgacggcgtcggggggagtatagttggagtcgtaggggttcggggggaggtcgggcgcggggggcgtatagtcggggtcgtaggggttttgggggaggttgggcgcggcgggcgtatagtcggggtcgtagggatttcggggaaggtcgggcgcggggggcgtatagtcggggtcgtaggggttttgggggaggcggggcgcgggtggcgtgggggaaggcgggttagggtcgttgggtcggcggggcgcgcggtcgtgtagtttggcgcgacgtgttattttttagcgttgtaggtcgcggaacgtggtttagtagagtagtagtatgagcgggtagggtaggaagaaggagtatacggacgagtagattacgtagtcgcggttttttaggcggtatacggcggggtcgcggtcgcgtacgtcgttgaggtcgtatagtacgggcgtcgttatcgtcgcggatagtagttacgtggcgtcgatgagtagtagttgtcggcggtttttattttgtcggttgtagcgtagcggtacggttacggttacgaatttgcggggagcgtcgagggggcgtcggatagcgtataggtcgcggtgagggcggcgggcggggcgcgggggcgtcggggcgcgggcggggagggcggcgtatttgtttacgttgatggcgtataggttgaagatggaggcggtgtatagtatgacgtttatggttatgagggcgtcgtataggcgggggtttagtagttacgcgttattttggatttgcgcggcgatattataggttttgaggttttttagttatcgcgggtttttgtgattcgtttttatttttatgggtagttttagggttgaatacggagaagggggttcggttgtgagttagaggttagaggatcgggtagggaaatattttttttttacgtagatttttttttgttttgagttagggtttcgttgtgttatcgcggttggagtgttgtggttttattatggtttattgtagtttggaatttttgagtttaagcgatttttttattttagtttttagagtagttgggattatagtcgcgcgttattattttcggttgatttgtttttttttttgttttttgagacggagtttcgtttttgttgtttaggttggagtgtagtggtgagattttaatttattgtaattttcgttttttaggtttaagcgattttgtcgttttagttttttcgaatagttgggataatagtcgtagttattattttcggttgatattttaaaattttttgtagagattaggtttggtatgttttttaggttggttttaaattatttttttgtttttgttttttaaagttttgggattataggcgtgaattacggtttttggttttggttttttttttgttataaatatgagaacggtttggggaattttttgggggcgggtttgatattatcgggtttaaagggagtttttttttagtttggggtaggtagggttttcgttgggtttagaagcgaagttggttgttttgttggttaagttttttgtgggagattcgggtacgttaatttatttttgtttttttatttgtaagataagggtgatgatagtatttatattataattgttttgaagataaattataattaaaaatatgaagatcgtgtttagtgtttagcgtaggattttacgtggagtgattttttttaagggtaaaggagtaggtagtttttttaatttttttcgtcgatttggggagattaggagtttaaacgtcgttattgtgacgtttgcggttcgaaaggagtataggttacgcgtgtttcgtgttgttggtttttgttttagtcgtttggatttattgtgtttattaaggggaaatttcgagttttttttttttatagtcggggatatcgcgtttttagtttagttttaagttgtttttttttggtcgtagaggggttggtattaaggtcgatttattcgagggttagatttggtgtggagtgtgggttttattttttaatttttttttaggtttttttttagggtttttagtaggggtttggtttttatatattttttttttttttgggttttgtttagtttaggttttttttgcgagttgtgagtttttttttgggggtgtgttagtatttgtattaggtgtgtgtggtgggtagtggttgtggtagtgtgtgtgtgtgtgtgttttacggtagttagggggttgagtttgtatttgtttgtttgtttagttggttgttttggaggtgaaatttagttacggaggggattgggtttgataaagtcgtttgttttcggggtttttggatagaaggacgggtattttttggataatagacgttaagatagacggggaaggagaagaggaacgagggtcgggggatagatagcgtagcgggtggaaggtcgcgaggtggcggcggtgggtgtatcgtcgagggataaggcgtagcgtttttgtcgtcgttttagttggaagtttcgtattagaaaggggtcgggtcgcgtcgggtttttcgtagggatagggacggggaatcgaggagtaggtgaggatgttcgtgcggtcggacgcggtttatttcggagtagacgaagagcggtagtattaggagagcgaggaggaggtcggcggtcgttaggtttacgatgaaggagttggtgggcgtttgtagggcgcgttcggtggttacgtttacgtatacgagcgagtttttcgcgagtatcgcgtcgatgagtagtacgttttttattagcgtcgtcgcgttttgtttagttagtttcgtagatgttttcgtagatgttttcgcggtcggttcgcgtttagttagtagttcgttcgcgttcgcggtgttgcggttttttatggcgcgttcgggcgggcgttgagtatcgcggataacgtcgggtcgtaagtcggggagttttttttttcgggtacgtttcggtcggattttggtttcgttttcgattcgtttcggtttaggggggttttcgcggcgttttatcgtgagtttagtatttgtttattttggaattttgcgtagggagagacgggtacgtggacgaatgcggcggtttaaagagacgggaatgaagcgaggtggtggttacgggtaggttagtatcgttcggcgtcgcgcggggttcgcgattcgagaaatcgataaggatggaggggcggttagattaggttttgaagcgcgcgggtatcgacgttagcgttattttattcggttcgtgcgtgcgtttcggttttcgggcgt

SEQ ID NO: 840 - DNA, 554 bp, Artificial Sequence
  Description of Artificial Sequence: Synthetic polynucleotide
cgtacgcgagtagttatatatacgcgtatatatatatatacgttttgtttttcgtataaagtatcgtaggtatatacgcgtagattgagaatagagtttttattttaagtatcgcgtttttttttttttgttcgtttttttttatgggcgtggttgagtcggtggttaatgcggaggcgtcgttcgttttattttcgtatatttattttggtttttgggtttgtataagtataaacggtttttttttatttttaacgagggttggggaattaacgagtaggattagtttattaataagtaaagagatcgttaggagggatatttattttttgagggcgtcggtagggggagcggggttgagtcgttcgtttcgtatcgcgtcgtttcgtttagttcgtagtttatagtttttcgagtcgttgtttcgtaagatttttattttcgtttttatttttgtcgttcggtttagaagtgtggtgggattttgggggtagtagggggcgaggggggcgacggtgggttcgggggtgttcgaggtgttacgtttttggcgg

SEQ ID NO: 841 - DNA, 1101 bp, Artificial Sequence
  Description of Artificial Sequence: Synthetic polynucleotide
cgttgcgaggattaagggagatggaatgtagcgtaaagttttacgtaaacgtgtcgtgtaatatgaagttttttattttgagttggggagcgggtggtacgcgtggaagttgaatgttattatttttgggattaggcgtagcgttttttagaagcgtttttggtgacgggtttttgtttttttttaggacgttttttttagaatgtttcggggttttggacggttttggagaggacgggagggaagggaaggagacgggcggaacggggacgtatttgtttttattgtatttttttcgtttttttatttttagttatttgcggaggaggaagcgttttcggcgcggggacgcgttgggtgtggagtagttggattacggggtgttttcgtcgttggagggcgtgatttcgatggacggtagttgtaggaattttttgtcgggggttaagacggcgggtaggtttcgggttagttcggtttttaggttttgtttttgtacgttttttatgcggcgtattttgaagcgtcggcggcgaagcgtgggggtcgacgaattggattagatcgggttgttttcgggcgtattttgcggttcgggtatttgtagggcgggtagcggtcggttttttattatgttggtcgtcggtatgggggtcgtcgtttttgcgttttttttgagtttttcgttagcggtttggttcgcgtttttttttggttgttttttattttcggtttcgcggtatattttttaattttggggtcgaaggaataagtttttttttcggagcgtagcgaggaagggacgcgaggggacgcggcgtagcgcgtcgtcgttcggagtttaatttttcggagcgcgcgtttttcgggtcgttagtcgtcggcgaggttattcgggaggggcgggagtcgtttgttagttattcggtagtttttttggggtttttttcgcgcgttcgtttgtttttttttcgttgcgttttttcgtttgttggcgtttttgttttagcgggattcggtagttaggggttttagggggcggtgtagtaaatttttagcggtttgcgtttagtagattaggttggggagtcggtttggcgt

SEQ ID NO: 842 - DNA, 548 bp, Artificial Sequence
  Description of Artificial Sequence: Synthetic polynucleotide
cgggcgggtatagtttcgggttttgggaagacgtcgttcggtagtcgtagtggtcgttgtattaatgggttttggggtagggaggtgcggagtttagtttgcgtttttggttattttttcgcgtttcgtcgtcgtttatagtttattttttttttttgtagtcggtaggcggtcgtaatacgggcgggtcgagtacgtgggcgttttcgttatatttttatatatatatatacgcgcgcgcgtatatatatatacgtatgtatacgcgtattcgtattcgcgcgtttgtatttcgtgttgtttttttggtagatatataggcgtttacgagtttttttttgttagtttgtagggcggcgatttttaaaatttagtttcgggttttaatttaggtaagaagttgtttttttgttaatagttttttttcggttttcgttatagttatttggattttattttttcgcgattgttgttgttgttgttcggacgtggaagtagtaagaggcgtttggttaagatatattgacggtaatggtaagcgtttacgt

SEQ ID NO: 843 - DNA, 1153 bp, Artificial Sequence
  Description of Artificial Sequence: Synthetic polynucleotide
cggcgtatataagttgaggattgtcgaggcgttttttgcgaggtaaatacgaagtcgtttggttagtgagaagaaattcgaggtggtttttggggtagatagagtaggatttgtttttgttttttgtttttttcgtttttttttttttagcggcggcgatcgtagtaatagcggtagtggcggttgttgttattgttttgtcgttgtcgagtcggttatttgggtattcgcggagtcgcgtcgttgttatcgtttcggcggtttttcggagtgcgcggagggggcggcggaggagcgagatatttatagtaatcgaggatgcgaggggcgtttagtagtagcgagtgtttgggagttaggaggaggttttcgcgcgtcggtaatttttagtgttaggcgttttgtagttttcgcgcgtcgcgtttgggttcgtatcgttttcgtagtgagggttcgttcgagcggtaagtttttttcggcggttaagtcgatatttttttttcgtttcgtcgtttatttcgggtagtagtcgcggaataatggagagcgtagttagtagttttggagacggcgttcgggggaggacgcgtcgtcgtcgtcgtcgttgtcgttagggtaggcgcgcgtcgcgtggagtcgggcgggtgcgagggcgcgcggcggggggtggggggtacgcgtcgcgcggggggcgggggtagtggggggcgcgcgcgcgggttcggggagttcgcggggagagttcggcgttcggcgtagcgcggcgcggttaagtttcgcgtttttttcgttttttttcggcgcgttcgttttcgtttcgtcgttcgtattcgttgggggcgtttagaaagatgtatagaggtaacggttaggggagcggaggtttaagttatatgtttgcgttttcgggggttagagttcgttagttttcgcggatttcggttcgcggttagttcgagcggttcgggtgagtagcggtatagcggttttttcgtttcgcggttttcgttcgtcgagacgtggttttaagaagtggtgtcgtagtcggggtagaggcggaggaagtcgagtcgggtaagtcgggaaggttgcggagacgttttgtcggggtaggtgttgtagttttagttagcggtttttacggagggggcgg

SEQ ID NO: 844 - DNA, 1146 bp, Artificial Sequence
  Description of Artificial Sequence: Synthetic polynucleotide
cgttttagattttgcgttcggttttagtggggtttttcgttttttttcggtttgggttttttttttcgacggtttttgtcgaagggggcgtttttgtttttttgttttttttttacggtgttttggaaggtttgggtggtcgtagaacgtacgggggaggggtgcggcgtggattttcgggcggcgcgtttggattgcggtttcggagttgggttgggggacgagggggacgaggggggcgggggttcgtgggtacgttttattttattcgtgttcgcgatttgttaggagataagaggggagagggttttttaagaggagagcgtagtatttttttttttttttttaggagagtattcggttgagaataatggggaatcgaagggggatagtaaggggggcgtacggggtcgtttcgttcgtttttttttggggtaggtttggagggaaggtaggggtcgggggcgcggtttttcgagatttttcgtttggggggcgttttttttggttttcggagtttttttttttttcggggttttcgttttgtcggggggatgtcgggtgcgttggggtgcgtcgggaagtacggggatgcgcggcgttgtaggcgcggtttagggtttttcgggggtcgcgtcgcggagggggcgaagttaggagttggatcgtttttgtttttcgttttgggggtaatagtttcgtttttttagtttagacgttttcgagtcgttcgcgggtttttagcgggagtcgggggtggggtttttaagtattcgcgtttttatcgttttttttcgttttcggtttcggtttcggttcgcgttttagtatcgtcgttttttgggtttttttcggagtgggagggagtcgcggtttcgttttcgcgttcgtttttttttaggtttttcggtcgtcgcgtcgagtttttcgcgcgtggatagattgttcggtcgacggacggacgtaggagtcggttggcggtcgtcgggatttcgcgggtgggaggaggtttcggtcgtgtttcgggagggagaggggagggggcggaggaggaggaaggggaggagatagatttcggttttgagcgttatcggcgttgatacgcgagtttcggggcgttttaaattttcggttaggttttttcga

SEQ ID NO: 845 - DNA, 961 bp, Artificial Sequence
  Description of Artificial Sequence: Synthetic polynucleotide
cgtcgtcgttgtgagcgcgcgaggattcggggttttaagtggtgagaattattcgagggatttttcggatgtttttttttttttttgtttttgagttttgtagtatagcggtgtcggtcgtcggtagggaaggttgtattttttttgcgtcgttaaatcgtgtttattatcgcggtgattgtcgtttaggtcgtatttttgagtcgtattcgcgcgtaggggcgtacgggtacgcgtatagggaggtcgtatatatatatatatatttgtatagggacgagtcgggggtttttgacgttcgtcgtttatttcgtttcggtttggagttttttggtttcgtaggtgtagcgacgtttagttttcgtgcggttagcgcgtcgcgtcggcggattttgtagtttagagagtttagggagtttagggaggggagcggggcgcgggcggggtagtgtcgtataatcgtaggcgcgtttcgcgtcgttttcgtttcgggtttattttttttcgtcgcgttttttttagtttatttacggacgagcggattttcgattttcgcggtagggatattttaagagttttgtttaggtttgcgtcgtttagtatttcgttcgtgtcgggggttcggcggtttcgggcgagagacggaggttacgcgtagggttgggcgtaggggtcgtcgttcgaggattatgggtgggttagcgtttcgtcgggttgttagttggcggggatcgtcggcgtttgtgtcgggtcgcgttcgaggttgcgtcgttcgtgtcgtagcggttaatgcggtagtattcgcgaacgttatcgcggcgggtttcgttggttcgggttgcggcgtgggggcgggggatcggttttgagcggagtttcgcgggaggaggagcggacgggaggttgggagggattcgtaatattacgtaggatcggggtttttaggtgtcggggaaggcga

SEQ ID NO: 846 - DNA, 1040 bp, Artificial Sequence
  Description of Artificial Sequence: Synthetic polynucleotide
cgtatgtagcgtttatttgaggcgattaaatttaatatagtgttttcggggttcgggaggagaaattgaggtttagagagttttcgcgatgttagttacgttttgtaggtcgggttttttttaggttattatagcggttggcggagggagcgcgcgttttgttggtttggagggggcgggggtcgtggcggttttaaagcgtttagtttaggcgtcgcggggtggggcggttttggcggttgcggggcgtagggcgtagcggttaagcggggttttcggaagtatagttggggtgtttttatttacgattggtcgcgcgttttttttttttcgcgttagggaaggagcggttgcggttttcgtcgggcggaggtacggggggcgtacgaggggcggaggggatcgcgtcgcggaggagatggcgcggtacgtgcggtgacggtattcgagttttgagggttttagtttcgcgtttcgcgttttcgggatagtatggagcgttcggagttcgagttgattcggtagagttggcgggtagtgagtcgtagttcgttggagtacggtatcgttttgtttgttaggtgagggttatacgagcgttcggggatgcgggtggaggttgtttcggcgggaaaggggttacgcggtaggatcggtttcgaaggagggaaaattggtcgttgtcggggcgttggggcgtttgttagatgtgcgttagaggagcggggcgcggcgacgggtggtatagtttttttgtttttttttcgatcgtgggcgtttgttgttaattagcgtcgtatattatttttttagcggggtttatcgggtcgggcgggattttttttcgcggatttttttatatttgggcgggtggattttcgtttttgcgcggcgtttttatttcgttttgtgttttttgcgttttttttaggtagcgattgtaggggtgtatttcgttgtcggtattagggtattggggtgtttcgagagtcggggaagggagatgtgtggggcgagtttttgcgttcgcgtgtgagcgg

SEQ ID NO: 847 - DNA, 1497 bp, Artificial Sequence
  Description of Artificial Sequence: Synthetic polynucleotide
cgatatcgtgggtatttttagcgttttcgataggaatttttggtggtgttcgaatacggtttttcgcgttgtttttaggggcggattgttttttttttaggatttttttttgagtcggtgggttatgtttttttttcgtttgtcgggtatatttttgtgtatagttcgtgcggtttggtttggttttgcgttttacgttgtcggtttatttttttttttaaatgtagttttataagcgaggcgggatcggcgttagtgtttagttcgggatagttcggggtaggcggttatttattagtaggttttggcgcggaggtatgcggggtgggttgagcgcggggtttttgcgcggaggtttatttacgattttagaaggggttttcggcgttgttgtcgttggaaggtattttgtgttgggttttggttggttcggggttggtttttgcggttgttcgggttgttggaggagggagaggtggcggtttggtcggcgcgtatttgttgtttttatttttagcggattcgcgttggggtggtcgtcggcggtagcggtttttcgggtttatttttaggtttaattagaaattcgggagtagttgagagagtttcggagtttcgtgtattgtgcgttgttttgatttgttaaaaaagaaagtagaaaaatatttaaagtacgttcgagaagagaagggggaaatttggggtttgttttttttttagaaaagtcgaggtttagggtgagagtttttttgagcggtttttggttgagttagcggagcggggaggttttcggcgtttttgcgatgagattttatttttacgtcggttgcgtttcgggattttcgcgaggattcgttcggcgggcgcgcgagcgagcggggttttttcgggttttaagcggtttcggggtcggcgtttcgtgattttgtcggatttttttttttcgcgcggtagcgaagcgtattatcgaggttggggtcgggtttatcgtggggttagagttcgtttttagtaggatttcggcgaagattagttttcgtacgttagttcgtcgggtggaagttcggggtattaggataggttcggaggcggtcgcggggttcggtattgtttgcgaggaagtcgtttttgttcggttacgtcgtttttttcgtagcggtgttttcggggttgcgattataaatttcggcgttttcggggtgatgtttgtttcgttattagggttttcgcgcgtatagttttttttttgcgttcgttgttgtcggtagtcgtggaggtttaggtatttggcgtggtcgtggtcgtggggaaatttttcgcgtgcgttcggtgtttttattttgttgtgcgtttttcgttttttatgttaggcggggtcggaggtcggggttcggagggtggagagatttttggggataacgaggttttagagtataaacgtttagtattgcgggtgatatttcgggttttagttcgggagttcgcgggtggagtcgt

SEQ ID NO: 848 - DNA, 1845 bp, Artificial Sequence
  Description of Artificial Sequence: Synthetic polynucleotide
cggtcgggtgaggtggatatacgttgaatttcgaagacgggaaaatttagagtttggagttttatttggttagagtcgagttagttttatttattggaggcgttatagtttggttgaaggcgttggcgcggcgcggttttttggattagggttgcggcgggagcgtacgatttcgttgtattagtgggttgggggtgtcgtaataggaaggttttagtatttaaatttcgtaggtcgtacgtgtttaatatttagcgcgttatcggatttagaagggattaaaggataaagttttcgttattcgtttagtagatgtttttaggcggattcgagggttttaataggggtggcgagtaggaggtcggggaagatatcgtgttattttttaggtcgcgagggcgacggggttgatagtataaggaattcggaataaaaagtttgtgtaggtcgattttgtttttattatttatgtttgtgtattgaattttatttataatttgggagttttagaagtttgtcgtgtcgtttcgggtacgtttcggagggtttgggtcgcgggtttttttttttggcgaatttcgggggttttggacggacgttttcgagttttagtttcgtcgttcgcgttttgagtagtcgtttgcgtttttttttagatgcgcgtttgattttttaattaatttttttgttttttgcggtttttattcgagtttttagttttttcgtttttttcggttttcgtttgggtttagttttcgttcgattttttcgtcgaaggtattcgagtgagtgattttcgggagtcgaggtcgaggtcggcgggttcgcggcgcgggtcggagttgtatggaaatggttagaggagtcggcgggcgcggcggcgatttattttgggagtgatagtttttttgagcgttcggcgaatggtattttttgtttgtgaaagtttttttttttatttttgtttagattagttcgggggatgaatgtatttattatttagttcgttgattattttgaaacgttaaattaattattaagtattgaattaggcgtcggggtcggggtatcgggaggtgtgaaaatagcgagcggttggagatggggaaagcgaggggtgtagcgtcgagggggtcgggcggggtggttcggggcgcgggcgcggtagggtcggggttggtttggtcggtcgtcgagcgcgatttgtcggcgtgatcgtgcgcgatcgcggggttagcgggttataaaggattcgggcgggtaggaaggcgcggagtcggggtcgcggttcggagtaggttggggttcgtcgggatcgcggttagagcgcgttaagtgcgtaggacgcggggttggggttttggcgtgcgtttttcgtcgcgtattagtgtttatttttttacgtatcgttcgggatggtcgtttttagacggtttcggttcgcggttattttcgttattttcgcgtaggttttacgtcgttttagttgtttttcgaggtttttaagaaaatttgggcgtcgtttttcgatcgtagttttagttagagtttttcgagcgcggggtagtcgcgggtcgtttttattcggtcgcgattcgggattcgcgggtggtatttattttttcgaggcgtcggcggtagcgggaggcgagtttttcgcggttttcgttcgagtgcgcggggtacggaggagcgcgcgtttttaagattttttttcgagatttcgttaggtggtgttacgtcggttcggttttcgcggtttttcgtttcgcggttattcggtttttttgtttatcgcgggtagaatattagtttttcgttcgtattttgcgtttcgtcgttcgg

SEQ ID NO: 849 - DNA, 408 bp, Artificial Sequence
  Description of Artificial Sequence: Synthetic polynucleotide
cgaagcggggagaattcggttgggttgacggagacgttatatcgcgttaggggagtaggagttttttcggagcgggaggcggggcgtcgtgtggttgcgagcgcgttttttggatgtttcggtcggcgcgggggtgggtgggcgttttcgttttatttttggtttcgggcggttagtcgcggtgtgttcggagggttttgcgagggttgtgggtggcgggcgagttttagcggcgtagtagaggaggggttttcgagcgagcgtattagggagaagggggttcgtgtaaattttaggttgacgatcgcgtacgcgtttttcgggttattagttttgtcgtttttggtggggtatatcgaggagatcgtcgtggggaatcggggatcggattgtttgatagtcgagcgt

SEQ ID NO: 850 - DNA, 3276 bp, Artificial Sequence
  Description of Artificial Sequence: Synthetic polynucleotide
cgcggtatggtggttttcgcgtgtgtgtgtagcgtttgtaggtgtttcgtttagcgttttttgtataatagttgtaggttggattcgagggtttttttttttggggttttatagtgtttagaggtttcgttagttttagatatcgttttaggtttttttttttttttgacgtcgtttattttttttttttgcggaagggggatacgtttttttgtgtcgaggtgttaggtcgttgagatttgttgttttggaggaaaagttaggtagggtttttggttttgggcggttaggaaggttttacggttgttggggatagagacgcggggttaggttaagggttttcgtttcgtttaaatagtttgttttgggtagggtagggtttttttttcgcgttcgcgcgttttcggttgggtacggttcggttttaggtttgacgggcgcggtttttttattggacgcgtgcgggagggcggcgaggttaaagcgttggggttaggagggtattcgtttagcggttttttacgggagttggggtagaagacgtcgcgatttcgcgcgggtaatttttttcgaggcgcgttttagttcgtggcgttgtcggcgtagatttcgcgtggggatcggcgaggttaattttttttgcggttcggggtcggtagagtacgtaaggggtcgcgggtcgcgtgggtttgggcgcgtcgtggtgggtaagcggggttagcggagcgggaattcgtatatttttcgagcggagtcgaggataggttcgtgcgggtcgcggggtttttttggcgttaggaagcggcggtcgaaggagataacgagaacgtagtttcggtttagggaggtttaaaagttgagatgttgaacgtagacggcgggcgttcgggggttggggggcgggtagaggtcgttattttttaaaaaggtttttatcgagtcggtttttgttttcgttcgaggggcggacgttcgatttcggtattcgggattgttcgtgggtttttgttggttggggatttttagttttcggttgcgcgtagggaaaggttgtagaacgtagagattagagaagtcgggggcggcggggaggggtcggggggttacggttgtagttcggtttcgtagtttcggagttttagtttttttttttgtattacgggagcgtggacggagggattttcgaggttttgatcgttttgatagtttcggggcggggcggggcggggcggttgcgttagttttggttttgagtttttagttcggcgtcggaattcggatcgcgatttcgggagtcgagtttcgcggtttagatgaaggcgcgagtgcgcgggtgtcgggtggggtgtttgagcgagagcggagttttttaggtggacgtttttagttattttcgggattttttttgttggtttttgggtttgagaagtgggcgcggttggatagacgggaaatagttttttacgtataggtggatattcggggatatcgggcgcgcgcggcgtttggtaaggggaagttgttggagacgcgggcggttgttttcgcggggttttttttcgaagcgtcgttgcgaacgtttagtttcggcgacgtcgtttgttcgcgatcgggtcggcgtcgcggataggaaaggttcgattagttaggtttgttttcgagaagtttttagcgtttcgttcgtacggggtggggattgatagtttttcggggacggggtcgggtttatagagttcgggagttgggggaggggaggcgtcgggggtttcgattcgtgggaagtttttgtatttaggttgttcggcggttttttaatagtatacggatatttaagaaacgcggggcggttcggtgattttcgttttggatttagtggcgtcgcgaggttttatttcgagtcgttgattatcgggtattcgggtgttgacgatttgggtttttgggtatttagttcggttttaaacgatttcggtttaagggtgtttagtgtagttaggagggtcgaatcgaattttatttttcggacgcggtggtttttcgttcgtttggagtttcgtcggaggttcggggatattacgtaggtggtttattttcgagttcggggtcggagttcgatttttttttttttgagttttcggagttttcggggtagtagcgtcggtttaggcgggggcgggggaggagggggtcgcggtagtttttagaagggcgggggggacgcgagcggaggtagtttcggtggcgcgttcgtgagattttcgtcgcgtcgcgggttcgggtcgcggataattaaagcgggatttttttttcgttgacgtcggcggttcgaggtttttttcgcggcggtataaaaggcgcgggtttcgtagcgtaggcggtagtgggggtttgatagcgcggcggtgtggatcgcgcggtcgaagagcgcggcgtttagagcgcgggtcgttcgcggagttatagttcgagtcgggttttagtcggagtcgagttttagtcgagtcgagtcgggttcggagcgttcggtgttcgtagttatgtcggtcggtcgcgtcgcgcgtatttgtgcgttgttcgttttttgttttttgggcgtcggggtttaggatttcgggtcgacgcgttttatttgtatttcggtgttcgtggacgtcgatatgtgcgtcgcgttcgtggtcgtcggcggcgtcgaggagtttcggagtagcgtgttgtagtttcgcgagacggtgttgtagtagaaggagattattttgagttagaaggagattattcgcgagttgatcgttaagttgggtcgttgcgagagttagagtacgttggatttcggagtcggcgaggttcgggcgggcggcggtcgtaagtagttcggttcgggtaagaatattatgggcgatttgtttcggatatcggtcgtcgagacgtttagttaattcgggtaaattttgtaatcgtttaaaattcgtttggagaatttcgaggttcgcgcgcgttttcggtttcggtttttttttcggttcgttcgtttttttgtttttttttatttcgttttttattcggttaggtatttttcgttttcgttttagtcgcgcgggtgttcggtcggtgttttttcgcgtttgcgaggtttcgcggcggttattcgttttagttttttgttaggtcgttttcgtagtcgtttagaggggatcgcgtcgcgggttttttagtacggttttcgcgtttcgtttaacggtgtggtttttttcgtttttgtatttcgtagtagtatagtcg

SEQ ID NO: 851 - DNA, 1160 bp, Artificial Sequence
  Description of Artificial Sequence: Synthetic polynucleotide
cgtaggattcgtttttcgatggacgtgagttttatcggttcgttggtgagattttttacggagcgcgattattttagattttttttaatcgtttcgtttattattaagtatttgagttgtcggagttgggggttgatgtcggatagttttcgggggttgacgttcggtgatttttttatgttattgcggtcgtaggcgttacgggtaggtgggtgggtagggggagtatggatagagaggaggggattcgtgaggagtagattttagggcgagagtaagagcgcggtcggggtttttcgggggcgagcgtcgcggtagagttcgcgttttttttttttcgtcgttatttatttattttttcgggtagttgtttttagtgttttattttgggcgtttcggggtagtgcgggttggggcgagtggcgagggaaagaatgattgaaatttttcgagtagttttatcgcgcgcgtcgttttttttcgagttttagattgtttagtgttttagttgtaaagggttatttcggcgtttcggtttttcgttcgtcggttcgtttatttacgttcggggcgttatttatacggtaatgtttttgtttttgggtgcgtcgttgggaaattttcgaatttttataggtaaagatagagtgggatcggtagtttttagatttgaggcggaggggtcgcgggtcggagttttttgtagtcgttagtttgggaagattggagtgcgttgtttatcgagggtttgcgtcgcgtcggtcgtttcgggtcgttttgtgcgcgttcgcgcggtttgtattcgagcgttttcgcggcgtgcggtacgatgtaggcgcggcggtttagttcggtgattttaggtcggttcgcgcgttcgtcgtaacgattcggtagtcgaggtagcgtcgcgttttacgttcgttatcgtcgtcgtcgttttagtatatcgtaggcgtgagtttcgtcgcgatcgggagagtttttttagttgtgcgttttcgaggtatttggtcgggcggggaggcgtcgggtcggggcgtataggggttaggcgggggcgttgttgtttatttttcgtttttcgggcgtgcgtttcgtttcggagttcgtatttcgcgttcgcgtttcgtttggaagttttggggtatcggacgcgt

SEQ ID NO: 852 - DNA, 1134 bp, Artificial Sequence
  Description of Artificial Sequence: Synthetic polynucleotide
cgaggagggcggggcgttcggtttttagtcgcgcggttatcgtttgtttagtttggttggatttgagttcggttcgtcgatcgttggtcgaggcgtagttgaagtagttttttagtcgcggcgtttttattttttaattttacggtttttgcggcgcgggcgcgatgtagttggttcggggtgaaggtaaggcgcggggcgcggggcgcggggtattgggagcgaggtattggcgcgggatgttcggcgtaaggtgtagggcgcgggtcgtttttttttcgcgtttttttatttcgttaaagtttttttacgatggtttttatttcggttgggttagtttcgtaattttcgtttgttttttgttttttttttttttttcgagtcgcggggttttcggggcgcgcggattttcgttaggggtcgtgtaggcgcggagttttagtcggtttgttttgggttcgaagaaagttgtggtttggagttagttttttttttacgatttttgggggcgtttttttttttttttgagttcgcgatgggaaggcgtttttattttattttcggggtttttgagattttttggcgaggtggggcggcgcggtaggtgtagggttggggagggtttgatagttttggagagtgttcgattttagttcgtcgtcgttttttaggcggattttttagaggtaggttttagttttcggcgcggggaggcggcgcgttttagaggggcgtagggtgcgcgggggtcgttggtttttcgggtattttttttttgcggttttttcgttttttttcggagttggtgtttgaggtcgttgggattttagtttggcgttttttttcgtttcgagcgaggtaggtgtcgtgggcggtttcggttatttttgtatttcgagcgtttattttgtatttagttttaagtcggagagttttggggatagtcgagagtgttagtggttttatagggagattgagggttttgttttatttcgggcgtcgtgtgggtttgggttgtttatagtatttttgcgttttagtgataggagaagttaagcgcgaggttttttaatagttgcgtgtattttattttttaggtatttggaatttcggcgtttagaacgtgtttttcgg

SEQ ID NO: 853 - DNA, 10783 bp, Artificial Sequence
  Description of Artificial Sequence: Synthetic polynucleotide
cgagtcgggataaaggtttttaacgggagcgggatatttgtttatatttcgtttattgttcgtagtttagtaatcggtttgtatttgtgtttgttcgggttcgattatttaggacgcgtcgacgaggggtttgttttaatttgggttattgttatttacgttatatattgggggcgaggtagttagggttgtagaaagtcgtcgagcggttcggggagaggtgtttttatttagcgttggtaattcgggggtagttggggcgcggcggcgttcgttgtagttgcgcgcgaggaggattcggtgttcgcgcgtttagtttggttcgcgcggaggagtttaggttgtgggaagattagatttggatttcgtaggggtggttttttgtgttttttttcgtttttagataaagtttttttttgatatttttttggggcgaacgagtattaggtagttaatttatatttttgtattttttttttaaaaaagttttaattagaagaaggggtggtaaatgcggcgtggttttttttaattttagcgtcgaggaggaagtgtaagtttcgggaaagtttagtttttagagtcgagagtggttggaaattttatattaatttgatttaatttggaaacgtggagcgcgtatttcgaacgtatttaaggcgtttaaaaagagattatattaaagaattcgcgtgggagaagaaaattggggagaaaacgaggtatcgtcgggttatttagcgatttttttttttcgtagttttttgggtttttatttaggttggagatataatttttatttttattttcgtaatttcgtttcgtcgttttttcgttgttttatttttagttagaggttggagagggagggggtcggagagggagggataatagagggtaggaaagagtagggtcgtttgtttttttttttattcggggaaagaggttcgtagagtttagaggtagtagggttagggttcgattttagacgaagttggagttttttatttttatttcgtttttttcgggatcgttcgtaaagtagaaagtgaattgcgcgttttttttggtcgtagagaggtggaggcggggggttgggggtgggaggtggggggaggcggagtgaaggaaataaatgagtttttagtaaataaagggcggttggaagggggcgggtcgtttggtggtggttttggtcggttcggagcggagtttttttttgggttttgggttttttcgcggttaattggaattaattatttgttttgttatttttagtatttatttttaagttttaattaaaatattgatttaggaggtttatagaagttgggtttttgttatttgaatcggattttgtttaggtaattattaacgatggaaaggagagattttcgtagttcggttttcgtttttttttttttttttaaaggcgttataaatcgttaatttttcggtttgtcgggggtgggcgcgcgggggcggggaggtaggaatcggtgaatgttaaagaggattttttttttttttttggtttttgttttgtttttttttttttttttttttatttttattttttttaagatgtaatttgttaaaacggtttttttaagtgtgtggattcgcgagcgacgcggtggttttttgtatgtaaatattgggtttaaaaaaaaaaaggttcgtttcgtttttgtaattaattgatacgttatattttttattttgttttagagggtcgttggttgggagcgcggagttttttaaaatttataattttatatttgtaaatattgtttttatttatttgatttttaagattcgtttatacgtggttaatttttgcgtttttaatgtttttttttttttttttttatttttttttcgttttttttttcgtttttttttttttttttttttttttttttttttttttttttttttttttttttttcgtttttttaggttcgtgagtggagtttagttttatatggattgatcgttcgggtaatggtttatttttttttcgttattagtcgttatcgcgcgtcgagcggtcgtcggagttcgagttgacgtcgttttggtattttttttggagttagaaattaaggtcggggttcgcggcgttcggcgcgtaggtcgttcggttttttgcgtttattttcgcgtgtttttaaagaagatagagagaggtattgggttgggttttattttttttttttttatttttagtttttttttttttttaaaaataataattattttaataattaaagttaatttttttttttttttttttagtttttttttttaatttttttttttttcgttcgtcggggtaggggagcgttacgaattgattaagtgaagttataattttgcgatataaattttggggtttcgaattatgtcgttgattaatataaagacggggttttcggttaaggatattttagatttgtcggatattaacgatgaggagggttttgtggtcgaaggttcggaggaagagaacgaggggttcgagttagttaagagggtcgggtcgttggggtagggcgttttggacgcggtgtagagtttgtttttgaagaattttttttacgatagtagcgataattcgtatacgcgttggttggttagtatcgagggtttttagtattttcgtaagtagtaaaatttggttgtcgaggtcgtggttttttttatttttgtagtcgtagttcgggttggacgttgggagtgaaaggggaaggggttatgtaagttcggatttttttattcggattcgtagaaagatttttaatatttgtataggatgttttttgtttttttttttaagtttttttagtttcgggaaagaatttggtttttaaaattttttttaatgcgagaagttaaggagaaagagggagaagggttatattttttaggggttggtatatgatgttaattcggatcgatggttttagtcgtagttttcggatttcggtcgttgggagggattggtttggcgttttggaggtagttagcgagtttcgttcgggtacgggtggagggtggggaggtttcgggtggttcgggtataaatagtttattttgttttttgcgcgattatagaggacgttttgtgtagtgtagggggtgtttagaaggttcgaaagtagaaacgaaagtttttaaaaatttgttttaaatggtcgagtcgattaatgttgggattgtggggtattttttttaaaaatttgtttacgtttcgtcggagaggaaatcgtttaagggcgtcggagtttttaattcgcgatgatttttagtgttatttttttttttaaatttttatttatattatgtgagttttttgaaaggcgagtttttagtttttatttttacggatttttttttttattttgggaggtttcgacgttttcgttaggcgtagaggaaggtaggggttatggtaaaggtagcggggttgggttgttaggcgcggaggtttagggtcgtacggaggatttagggtgtttcgagtttggtgtaggttgcgcgcggtttttagacgtttgacgcgtttttttttttttttttttttagtgtacggtttggttgtcggggcgtttttttaggatttaagttttaagttttcggagttttcggtcgacgagttatcggataatgataaggagatttcgggcggcgggggggacgtcggtaagaagcgaaagcggcgagtgtttttttttaaggcgtagatttacgagttggagcggcgttttcggtagtagcggtatttgtcggcgttcgagcgcgaatatttggttagttttattcgttttacgtttacgtaggttaagatttggttttagaattatcgttataagatgaagcgcgttcgggtcgagaaaggtatggaggtgacgtttttgttttcgtcgcgtcgggtggtcgtgttcgttttggttagggacggtaaattatgttacgcgtttaaagtttaggatttggtagtcgttattttttaggcgggtatttttttttttgtttatagcgcgtagtcgttgtagtatatgtagtataacgtttagtatagttcggttagtattttttagtattcgatagtatattttttggtttaggtttagtagtggatttggtgagcgtcgttttaacgagattcgcggttttaggtttaggttttatttcggcggcggtggcggcgaggaggtttcggtttttatggtggttattattattattataattattattatggagtcgagttgattttcggttttattagggaggcgtcgggaggttgtttgcgtttttttggagtggtagattttatttatttagttttgtttatgtttttttttttgaattttgggagagggttgaattttacgtcgtgtttatagaatgtttgcgtagtttcgtttttttgttttttttcggggggattaaatcgttttagcgttaatgtcgttatttgaaaacgagaaaaagatcgattttttatttttgttttcgtgtattttgtaaaatatgtttgtgtgagtagcgatattgttagtcgttttttaaagtaagtggagaatattttaaaaatatagagaatttttttttttttttaaaaaaaaataagaaaatgttaaatatttatggttatgtaaacgttttgataattggtggtagatttcgtttttcgttgtaaatatcggtggtgattgttgttaaaatgatttttaggatcggtttgtttttcgtttgggtttaatttttttttttgtggtttgtttgggtttgttttttgttttgtttttgtttttgcgtttttttttgttttttttttttttttttttattttattgtgtaaatattttttaaatatggaaaagaaaattttgtaggtagggagttttttgttttgtttttcgggtttttagtttcgaatttggagtttagttattcggcgcggttttttaatagcgtcgggcgtagaaagttttcgattttttaaataagaattttaataaaaattttgtgtttaaaaaagaaaaaaagaaaaaatttttgttttttcgtttgttttattgcgtcgggtcggaggtttgggtttgggagtcgggttcggtcgttcgcggggtttttataggcggtttttttcgggcggggaggtcgggggtatcggggttttggggcgggcggggttttcggtgtaggttttttcgattataggttgtatttcgcgtttaggattggggcggggaggagaacgttcggttttcggtttgcgagcggtcggtcggaagtttagggtcgtttattttttttcgtattttttttggtttcgcgcgttgtttgaatttcgggcggtagcgttcggttacgggaggaaaagtgatttcgggagtcgtaaaggcgaggagagtaaatttttttcgttggtttaaatttatgagtggtttttttagtttgagaagttgttgaagttattatattcgatgatttttattttgttatatttgatttattttacgttaagaaagtgggtgggtgggggtttgaggttaagattggttgttttttttttattttttatttttttttaaaatttgcgggttggtgttgatttaggagatcgttaaggttgggggtgggaacggttagggcgcgcgaggttttggtttagggggtttgggggaagtacgcggggttttgggttcgggggagggaggggatattgtagttttttttaggatttttggttttaggaagttagggagcgagaatttttggtaattttagtaaattatgtttttttttttttttacgtttttatttttttcgggtttttaggttttttttcggggattggatttcgggtttttttttttttagcgttcggcggttcgaattagggtgtgcggtttttttaggttagtttttgagcgtggaattgggtggattgttaggaagtagaggtttgggggtggggtgagtttttcggatgggaagtgggtatatagtttcgggtacgttcgggaagggcgtatttattttttcggcggggaacggatttcgttttatttttgttgttggaggaagatttttttggtagatgttggcgtatatttggttacgcgggggagcgttttaggaagtttggttaattggaggatgagttttttttttttatttcgcgggtttttaaaaatatttgggattttagtttagagtttagcgggtgttgtagacgttgagggattgaacgtcggcgtatttggaaattgtatttttgtttttttcgaagttgtattattaaggttggggggttgggtggtagtgaggaggtcgggtaaaaggagcggttttagttgattttttcgttttttgtagttgatgattaggtttaatttaatatttaaagtaaatatgattattcgtgcgattaaatttgtgcgtcgatagtattttgcgtagtagtttagggacgcgatgatattttattttcgcgttttatatcgtttttggataattgagggttcggaagtttttttaatattttagtaaaggtttttttttattttcgggtttattttcggggaaagggtagtttttttaaatgttaaaaggtttttttttgttttttatattagtttggtaatgtttgggggtttatgttttattgtttttaaaggttaacgaattttttttaaatagtttgttgtgtaataattgaacgtttaatttgttttggtattaattatttaatatttatttgtaattttttttaattttaaaatttttttgggaggaaaggtgagggttttaagttttttggagcggagttgttagaaggtttgaggttattttgatttttttaggttttagggtttttagggtgagaatgattataagagatttttaggtttttagagaggaagggggaagcgtggaaggtttttattttggtaggtttttattatttgtttattgaggataaatttggagttgtggttaggatcgcgggtttgtaatttgggtgtgcgtttttgtggtcggtcgggagttcgggaggtggattcggcgttcgtttttttttgttttcgggtttttatggagttaataaaagcgtttgcggagttttgtgtggttttaattttagcgttttgggagcgtattcggcgcggggttcgttttagtagtttattttcgtttaatttatagcgggcggtataaaatcgtataatgggaaagttgggagtcggagatgttagaggcgtgtatattaaaaagggatagagaaaggatcgcggggatagagagaggggaagaaggagaaggggttcgttttttatttttcgttttatttcgtattatttagcgcgtttatcgtcggtagtgaatttcggagttaggtagaagtttttttggggttttgttgggtttgttattgggtttttttgttatttacgggttttatgttggattttatatggttagttgggtcgagggagcgcgaggagggattcgtataaaatttaaattgtgttcggtttttaaattttgtattgttgtttgtgaaaggaagacgtattaaaaattcgtgttatatttattggggaggaggttggaggaggggagaaaaagttatttttgtttttgatggtttcggagggcgtttgtttcgtttaggtttcgtgatattgaaagttggattttttttattttgttttttttttttaaaatttttttttttttttttttttataatttcgtttttataatttttttttttatttttataattttttttttttataattttttttttttttttatttttttttttttttttttttgtttttttgattttaacgttgggatgggagttcgcgaatttgcgtttttagggtttggtttatttgtgcgtattttgtttattgttgtgtgtgtattaggaaattaatttttgtttgggagttttgtattatcggatcgttttggggtttaggaggtaatttagggtatttagggtttgggtgatgttcggttttttacgggtttagcggtttttgggtagatgaaaatttattttttgatttcgtaatcgatcggtttcgaagcgttcgcgcgcggagtcgtttttttatttatcgcgagaaaggttttgagaggttaagggtgtcgtttagtttcgggtttagttagatttgggttgtagtcggttttaaggcgatttgcgttcggtcggattatttggttattaatttcgaagagttaaagacgcgcgcgtttttttgaattatgcgcggggatttattttattggttttttggtgcgatgggaaattattttagaaattttttttaatagcgtttttttttatgttggaggagggagatattttttttttaatttttaatgttttttgtatcgcgtgtttataaaatttagtattagggagatatagtagggtttttaaggaatttgtttattttttgttttttttaagcggtttaaattggcgcgaggtagtcggaaataatttgggttatgtttttttttttgtaattgttaggttaaaatttttataagtagtttttaaataaattatatgtattaaataaaaatagtttatgttgagttttgtggaaataaaaattggaatttagatatgttttttataaagttattcggtttttaatgagtagaattgagttggtggaaatttcgattaatgggaaatttggatgcgtttttttttttatttagtataacggttatatttagtagaattagataatttggtaagagtggaagtttttttttttaatattttttattttagatggggaaataatttatttttttatttattgattgttgggtttagttgagatttggtgtgtatttttcgagtttttttaagagtttggttattgaaaagttaatttaatatttatcgagtataaggatagtttttagacgtatttattaaggtttatcgttaagtgattatttggattgaagataaaggttaggggagggggcgtttaggtatattagattttttttatttgggttttttttatttagaattaggaaatcgggagcgcgtttgtgcgttgttgaagtttttttttcggtgttaagtggcgggcggattagatattgtgttgggcggtattttaggaaatatgtatttgtggttttttgagaggttaagcgtagtgatattttaaatcgtgtcgatatattattttttatttaggatttgtaaataaatttttgattttttcggcgtattatagtcgtcgttatttcgttaaggaagcgatttgagttttattgtttttattaacgtttcgagatatatatatatatatatatatatatatatatatatatttttttttcgtattttgatttttaaaggttttattttttttttttcgaggtatcgttattaataaagaggcgaataggttttagcgtcgttattcgagtaagcggggaaatgtgggttagtagtttaggttcgcgcgcggatttcgcgtacgttttacgcgttttttcgggtcggagaatcgagcgtgtgtcgcgtgttgtcgtcgttaggaggcgttcgagtttagcgttttcgagcgtttttgcgcgcgggttcgggtagagttcgggagtcgtcggaggtagttgcgtattagcggattcgcggttcgggtcggagttcggtgagtggtgttaagaggtggcggcgagtcggaattttggggagagtcgcgagttagacggcggcgggtgtttgggaggtgcgagtcgatttgtgttcggttgtggttttttcgttatgtttttttttttttacgtgcgtattatcgttcgttttagtttcggtttttatcgtgtttgggtatagattatagtcgattggtttaggagcgttttggttattgggagggttttattaggcgttagggcgcgttgttttcgcgattttagggtttttggcggcgtcggtcgcgcgggtggacgcggagagggcggtgttgcgagggttcggagagtgggtgttcgcgtggggaggcggttcgggagcgcgggagcgatgcggaggagggattcggtttggttgtaggttttcggggcgggggtttcgggaaggagagattttcgtttttcgttcgttttggattcgggtttcgtcggattttcggtttttgtcgttcgtcgtttggaagcggggtaggcgtatagtttagacgttagggagagacgtttcgtcgatttagatcgtggggttagggttcgggaggtaagaacgttttatatatagtagggtattttaggtaatttttatttcgtgttgaggtttcggttagggtgtaaaggtgttcgggaatggaagggatacgagggtgtggacgtttcgtattttatttacgtttggtgttttttgagaggttgggcgtggggtagagggtaggggataagggggtgatattttttaaggttttttttttaataaaagtagggtttgtagttttagtttgattcgttgattgttgggtggaatcgttttatattaaaggtatcgtggttttaaatattgttttttttatttttttaagttttcgttttaaaattagttgtcggtgggtcggtgagggcgtttgtagtatttaggtttttcgcggggcggcgcggttggataagaaaaggtttttcggttggggcgcgtagcgtagtttagatatttgcgggattcgagatgttttcgcga

SEQ ID NO: 854 - DNA, 2194 bp, Artificial Sequence
  Description of Artificial Sequence: Synthetic polynucleotide
cgggttatattatcgttaaatatagagtacgtaatttaattaaaaattcgattttagtttttttttgttcgcgttagaacggatattagattgtttttcgttcgttttttagtagtttttttttatttcggttgttgttaggatttcgcgatttagatttttttttgaagattattttcgattttcgacgcggtagtttttgaggtcgtagtttagtacggagaagttggtcggttttgggggttatgaggttgtttattttataggcgtaggtttacgtagtatatatattatttttttttttggatttagattaaatacgttgggttgtaggagggagacggatagatatacggattcgcgcgcgtacgttttattaattgattttaattagaaaacggagttattgtgtaacgtttagttttttttttttcgatatttttaattagttaagttttcggtcggtgtttgttgtattaaatattaggacgtggttagggaaggcgtaggtatcggttcgagttaggagcgtcgcggcgttagcgtatttgacgtcgtaggaggattgtgcgtatttgaagtttgggtgttaagcgtttaagtttttgcgtgtaacgaaatttttaaaggaaaataggattattagaagatttttttttttcgttttttagaaacgttaagcggtttttttggtcgtttttttaaagttcggttgttagagttattttagtagggttttgtaaaaagcgtatagggataaagttttttttttaagaaaagtgtttaatttatttagtgagttatttttttttttttattgtttagagagtgtatatgaagaggtagaaattacgattaggaaaaagcgagatttaaattggaattaaaaaagcgtatgtgttcgtttttatttcggcgttagggttgtggtttttagggttgtaggttgtcgcggttgttaggggttagatagtttttgaaggtaggttttgttttggttagaggaaagaggttttaggagtttttgttttcgttacggtcgttcgtcgggattttttattttaagcgcgtttgtattttgtttgtcgtttcgttcggagaattagtttgtttttttttttatttttaaatagatttaggtttttagtttcgtggtcgttcggtttattagttttggttggtttttttcgggttatttcgaggggtagttcgaattcgtagagttttggttcgtcgcgcgtttttatggttttgttgggtagtttggtttcgttacgtttttagttttcggttttattagtttttatcgaattcgtatagtagttttttcgcgtttttcggggtggtaaggtattaaggtgtagtttaggttagtatcgatttttttttgggtattttttttgtcggtttagttttttttttcgttttgcgatttcgtgttttttaagtttcgtcgcggcgattattcggatttatcgcgggcgttacgtcgtcgtcgggtttgcgcgtttcgaggcggagttaggattaggatattcgttagcgtagggtagtttttagttttcgtcgttagttcgcggtttttgtcgcgatttcgtttattgcgggttttttcgttcgttttcgcggtcgggaggtttggatttattttcgggataaggtgattcggtaagtgcgtttaagcggtcgttcgcgattttttcgagcgagcgagcgtgcggggcggtgcggcgttcgtttttgttttttcgttgttaggttttttttttttttgttttttttttagcgtcgttttgttttttacgttttttttcgttttgcgtttttcgtttgcgttttcggttgtttcgagcgtcgggcgcggggtagcggcggtagttcgagcggcggggagtcgggagttgcggcgtcggggcggagtttaattttttcggttttcgggagaggaaggggtgcggggagattttcgtcgcgttcgtttggtcggtaggttgggcgaggggcgttttggggcgagtcgttttttttcgtttgtcgagtttgtcgacgcgcgtgttggaggtagcgggcgcgggtttcgggggaggagggtagggaagagaaggagggcgtagttcgcgcgaaggtggttattaattttggtttagattagggaggttttagcgggggatcgcgtttagatggtggttcgcgg

SEQ ID NO: 855 - DNA, 284 bp, Artificial Sequence
  Description of Artificial Sequence: Synthetic polynucleotide
cgagagtagcgtacgttagcgtcgttttttagattcgagtagagtcggagagagagacgagagggtgggaggtttcggagtaatttttttttaggttgaagggcggcgaggtatagtttcgagaagttattaaggttatttggagatttttggttttttgaattttgcgcgttaagtcgggatagttgttttgttgttcggagagtagttcgcgttaggaagagagtaacgaggaaaggagagggattttggcgtttcggtaggcgagaggcgaggttgagcga

SEQ ID NO: 856 - DNA, 603 bp, Artificial Sequence
  Description of Artificial Sequence: Synthetic polynucleotide
cgttttgttcggttgatgagtagaattgtcgggatatgcgcgtttcggtcgaaggggggtaattttcgaatttcgggaattcgttgtgtgaagtaggttatttttagggacgcgcggggagttcggttttcgcgttatgtcgcggcgtaagtaggttaagttttagtattttaatttcgaggagtcgcggtttgcgcgtcgggagtgtgcggaggtggtttcgtaggtggcgggggagtcgggtgagtagcgtcgttggagtttcgttcgggggttgggggtcggtgtttagaggtttttcggattcgcgcgggtacgaggatcgggtaggggatttgaaagggcgggcgaagcgttcggcgtagagttttgggattcggatttgggcgttttcgtttttcgtttttgtaaattatatttttttggagtttatcgttttttttttcgtttggatttttttagttattttttttaagagttagttaacgagtttgttttttaaatacgttggaaggatgtttagaggattttttagaggttgttttcgggatgcgcgggtattcgagttttcggtttttttggtattgggtttcggttgcgcgt

SEQ ID NO: 857 - DNA, 6511 bp, Artificial Sequence
  Description of Artificial Sequence: Synthetic polynucleotide
cgtagggtgaataggttcggttaggagtcgtagcgtcgtttatttgtatttcgtttatttggtgaggtatgtcgtggagttttaggttttcggttaggttcgcggtatttagggcgtgtgcgtggggtagtagtaggtcggagcggcggtaggtatttttgcgggcgtttatcgcgttcgtttttagttcggagaggtggggtagtaggtcggtcgggcgttcgtggtgcgagggtagtttcgtttttttttggttttggcggtcgggttaggtttgttgttggttgtttgtgggcgtcggttggtgtagggggttgatggcggcggcgtacgttttttttagatgcgagtaggggtcggtcgattgggagtaggttagttgttggtagggagggggaaagtagggtggcggttgatattcggcgattttagtgtgggagaggggtggcgcggggttgtagaggtgttgttcggcggaggagaggtgggggattcgcggatttttattgttgttttcgtcgtggcgattttggagggaaaaaaaaaaataggagatttcgttagtgcgaaatttcgttattgcgaattggtcggtatcgtcgggttacgtagagggtttcgggggattaatcgtatttcgttcggcggggtttgtttagggtcggaaggtattcgggggtaatgcgtttcgaggatttcgttgtaagtaaagagtgcggggagggaggagagtttggtgaaagatttgggggaacgagtttttaaagttcggcggcgaaggtttaggcgttgtttttaagttcgaggcgtttggaggcgttaagttcgaattttgggttttgggttagaaaagttcgtggtcggagttcggggcgaaggagttagagttcggggcgaaggagtcggacgttcggtgtagagttatttcgtggagttcgtttatgacgtagggattgttggaggtggtagcgcggtaggcgcggatagagtgcgcggcgcgggaaatgcgtatttttttcgttttcgggatttttttttttacgttttcgggataaagattttcgagcgggcggcgttcggaaagtagggttcgttattttgcgtcgttttgggaagtgaagagggagcgcgcgtatagggcggttttttttgttggtcgggtttagtcgaggggagtaataagtgggggcgttttgtattgttaagggtagtgttttcgtacgtcggggcgtagagggggtatgaagaattttggaaattgggtagttttgttcgcgtacgttttttcgtttttgggcggttcgatttagtttttaaaggatgcgtttttatttgtttaggggtttcggggcgtcgggaatttggaggaatatggcgttgtcgttttttggcggaagcgttcgggtttgcgggtaggggtagttttttagggttcggaggcgtagtgaattttcgcgagttcgtagttcgagtttcgcgttttcggcgtttttgagttcgtttagcgttgtttgcgtttttttttttttttcgttcgtcgtttttttttttttttttatttttcgaaattttagtttaatttgttcgataggttggagtattcgcgagtttttacggttttatttggtttcgggtatttttattattattttttagtttttattttttttgaaagttaaatttcggttgttttcgtgttttttcgaggaggtagcggggtaggtgataagtcggttttggaggagtgttcgttaaggtgtcgttagtaggtagttttatttgatttttttggatagagatttcgtgcgtaaaagttacgtttgagggttgtagacggggtattttttcgagaaaacgggaagtagggttgtttgtcgtttaggaaagcgttcggtaagttgtgtgggtgggatttgttattttttttttaggtttcgttttcgaggggaggttatttaggaaaaggttttatataggaaaggggtttcgtagaaatggattaaggggtgttcggagaagtggatttcgttttatcgagaggttagggtttttatgttttcgttttcgatttcggtttagtggtttttgtttttcggattgttttcggcggggcggggttgtatttcggagttttagtttatttcgtagtttttttcgtatttgatattatcggttattttttataatatggcgttcggcgttttttaaaatagtcgttagttaaatttaggatttttttagtttttaagcggtaaatttaaaatcggggttacggtgattaggcgtttgtcgtcgttttcgtcgcgcgcgggttttgttgttcgggttattggatacgtatcggcggttttgcgagcgtagatgttgtcgtcgcgagtgttaagatcgtttcgcggacggggaaagtcgcgttcgaatagtgtgttttggcgatagtcgggggattcgagcgttttaatgagaaggaaattattataattttttttcgggggtcggcgcggaggtttaggcgtcgggcggggcggtttttagttagttttagtttagtttcgtttcgtattcgggtttggcgtagcgtcgagttttacgttgtgagggacgaagcgcggagttagtgggcggtgtttcgttgatagtcgaagatttgcgaggtttgggtttttcgacgcgttttttttttgttatttttatcgtaaatatatttgagattggtagagttgggggaagggatttaaatattgaaatttatttttttttcgtttaaacggtttttattcgtttttttaaaagacggatgttatttggagttaagaaattgcgtatttggggagcgatttaataatcggggtttttttattttttaaaaatatattttattttatttatattttattgaggtttaaggtttgagttgggattatgtagttggagttttagtgcgttagagacgtttagtttttttcgtgggtatagcgcggtttcggttttcgggcgggaggagagaggaagggatttttggggagtttgttttaagggtcgtagaggtagtagacggttttattcgtttaggagttgcggatagcggcgtttcgtcgttgtcgttcgaagtggtatttttcgcggttggttgaggttagggggaattcgcgcgtattggattagtttagcggttcggttttgttttgttttgcggaacgtcggttttgtagttgtttttggcgggtcggttatttagaagtttttattcgttttgggaaagaagcgtcgggtaggaataaaattcgagcgttacgggtaaggtgagggtgaggaggtgtaggaagttgggagagagtttgtagagagttttcgattggagaggtagatatttaggttttatatgtttagatagaaaacgaaatttttttttatataaacgttgtttttttttttttttcggtatttgttatttaaatttgaaagtaaagtgtaatattaatttttaaaatttaaattaacgaaattttttggtttagttattatgtagtaattgatttttattgtaaggggaatatcgttaattttcgagggcgtatttgttgggacgttttaattggttttttgggttggatttaaatattttgtggggattagaggataagattatttttatttgatattgaatacgattttgtaataattaatgtttattagtacggtgttcgtatttgtagtagatatgatttttttatttacggaatggcggtatttattgtttcgttgttttttttcgggttcgtttgaattttagtatttatttagatttaggtgggtttaaaagaaaataataataataggcgttttttaagggaaattttttttcggttttagatagtagttaaattttaggtgatttttcgatcggacgcgggaataaaatttggaagttgaaattattgagatttttcggttaagtatatttgtagggttttgtattaaggagaatagtgtataaaaagatatataggattttgatatttcggttttaaaataggtttttgggggtaaaataagttatcgtagaagtagcgtttttggtattagcggcgggggagggggatatttgttagaagtagaaattagatttaggttcgtaggtattttagagtataggtttaggaagatgggttttagattcgttagaggtgcggcgtttttttcgggcgtttgggattttttgacgggtgtcgttgggttgttcgatattttgggttttttagttttcggttttattttttgattcggtttgaggtgtagtttgaataagttgttttgtttgtgttggtaagtttattttttgtacgttggggttcggaatgggtaagaaggtgtttattttttattttaggttttggttttttttttttatagtaatattagttaaagttgttcggaggaatcgatatgttttttcgtttgggagcgtttacgtaggaggcgaagggagtcgatgggtattgagggttcgcgtagtatcgtgtcgtgggtttaaaggatttagaggattcggaatcgtttggtaaaggttatttatttttaaggagtttttttggatttcggcgttgttttttttttaatgggtaagcgttcgaattggagcgtaattttcgcgttttttgtacggaaggtagttagaataaattttttgttttttcggtacgggagatttttttttaatacgtatattttcggtttttgggtcggtatttaggtacgcgcgcgtttttgtgaggaagttttaatttttttttgattttaatttttttgtttagtagagtcgggaatcgaaggttttagtatttaagatagtttttttttaacgttttcgttttttgtttacgtgaagacgcggattgcgtggtcgcgtttaagatagtcggtatcggtagaaggggatttttttggaatttcggaggtttcgtagtcgtttggagaagaggatggaaggttgtcgggggtttttttttatcgttttttagggagtttaaatttatttattttttggaagttttggatttacgtttttatgaaatcgtaaattaggtttttgtaatagcgggagcgttttaatagcgcgttatttttaaagaggcgcgaggtggtgtttttggaaatagggttttcggttttaggtttgagttattcgttatttttgtttttattttagacggaagaaggcggttaggcgggtagagtaagattcgggtagatttgcgattttttttttcgttttagggaggggattttcgagtagaagatggaggttttcgagcgttttcgtagatttcgcgttacgcgtcggacgtttgtttcgtttttcgggataacgtgagcgtcggtagggattttagtaagtggtagattcgttaggattaagtaaggtggaaaggtcggggtttgcggtaaatttaggaggagggggtatttacgttcgttatttttttttcgcggtattggtatttattggatcgatattggcgttaaagggtattttgaagtatttatgtttagtaagggtatgttttggggtattatagatattaagttatagttattttaaaataattataaaaatgattatcgtaaataatagattgttttaatagggcgcgaagcggtcgtcgtatatagacgtttttggttttagttttattagatttagtttattgttcgtttttttgcgtttcgcgttaggtcgtatgtttttcgtttagaattttttgagttttaatttttttttttaaataatttttttttttaaataggtaaagtgaggcgaggagttgaggggtttataggtttttaagttttcgaggagggttcgggtttacgttagtttcggttcgttaaacgagatttcgtgggtatagtttttaatttgataattatttgttttattttatagtaggtaaaagtgaatttttagtcgtttaattatttgaaagttataaaggtgtttagggttgaaggttatttttttagcggttttattagggagttcgttagagatatgtttgattttttttttgttttgtttcgggggggattttcgttcgtcggaggttttatacgtttggtcgtgggatggtagatttttgttatttttttattaatatttcggagtttattcgtacgtattttaatcgttcggagcgtaggttcgaggattaaggcggtagtttcgtgttttttgaggtttttttcgtttcgtgttttgggtcgttatatatttttcggttaagttcggcgtttttaatttagaatttggtcgtttttaggcgtggagtaggttattgttgttagacgttgcgcggattcgtttttttgcgttagtattgggcgataggtagttcgggtagtatttaggagttattttgtacggttttaggcgttcgttttatttagcgttatttttcgtttttcgtagcgagttttttcgtagttttttttttttgttagttttcggggtcgt

SEQ ID NO: 858 - DNA, 1560 bp, Artificial Sequence
  Description of Artificial Sequence: Synthetic polynucleotide
cgttttttaatcgaatttttttttttgggaatcgtagtttagcgcggtaattgagttatcgtaatcgggcggtggggaggaagggtggtttaggaaatcggcgagggagaaaagcggtggaagggagagttttttttttggagcggttttagtagtataaagtgttggttatagcgtttttttcgtttttagattgacgagtagtggcgtggagttagcgcggaggttgttttttttttttttcgagttcgtagcgcggagcgcggtttagtattaacggagtcgggggcggcgtttttgggatggaaaagggttaaaggggaggagtggggtgggggtgggggttttattggtttattataaaaggatcgttcggttgttcggtttttgtattcgttggaaagcggtttcgagttaggggttattgtaaagttagggtgcgttatcggacggagaggggagagttttgagtagagtgagtaatatcgtagttaaggcggaggtcgaagaggggcgttaggtattaattttcgcgttgttttagtttcggaggcgttttagagcgttttttgttttagtagagttattttgtttgcgtttgttttttagtgtttttaattttgcgttggaagaaaaatttttcgcgcgtcggtagaattgtagcgtttttttttagtgatttcgggagtttcggttgtagtcggttttgcgcgtttttttaacgaataatagaaattgttaattttaataatttagagtaggttaacgaggttttgttttttcgattcgaattaaaggtttttcgtttcgtgcgttgttacgagcggtgttttttggggttttaatgtagcgagttgtgttcgaggggttcggaaggcgtaagttgggtagcgatatggggaacgcggagcgggtttcggggtttcggagttttgggttagtatttacgttgttgttgttcgtcgcggcgttattggtcgtgtcggacgtattcgggcgttttttcgaggaggacgaggagttagtggtgtcggagttggagcgcgtttcgggatacgggattacgcgttttcgtttgtacgtttttgattagtagttggatttggagttgcggttcgatagtagttttttggcgttcggttttacgttttagaacgtggggcgtaaattcgggttcgagacgtcgttttcggaaatcgatttggcgtattgtttttatttcggtatcgtgaatggcgattttagttcggttgtcgtttttagtttttgcgagggcgtgcgcggcgttttttatttgttgggggaggcgtattttatttagtcgttgttcgtcgttagcgagcgtttcgttatcgtcgttttaggggagaagtcgtcggtattattatagttttattttttgcggcggaatcggtagggcgacgtcggcggtacgtgcggggtcgtggacgacgagtttcggtcgattgggaaagcggagatcgaagacgaggacgaagggattgagggcgaggacgaaggggtttagtggtcgtcgtaggattcggtattgtaaggcgt

SEQ ID NO: 859 - DNA, 600 bp, Artificial Sequence
  Description of Artificial Sequence: Synthetic polynucleotide
cgtcggcggtggagggaagtttcgttagggggcgttgaaggttcgtaggttttgcgatcgttttttttcgtagggcgtcgttttcgtttcgtttattttgtttcgcgttaggcgtcgaaggggtagttaggtaggaagatattcgttatcgtttgttttagtgttcggatttaaagggaagaaattaaggtttttaggatatttagttgagtggcggaggtcgaattcgaattcgggatcgaggtagagggcgtttcggcgggtggtggaggggtacgcggcgtgtaagtttttaggcgtttttattttttttattttcggtttaatttttaagaatgtgcgggagtcggggtcggaagcgattgttcgcgtttttaaatcggttagacgttggggcgtagggcgggcggagcgggtttagtttttttttatatggttcggtttcgcggggaggagttcggttcgggacgttttcgtttttgttacgaggttagcgggggtcgggtcggcgcgcggggcgtagtaatggcgggcgtcgggtgttggaggagtcgttttcggggtcggaaagatttcgagaggtatcgatttcgagatcgg

SEQ ID NO: 860 - DNA, 1021 bp, Artificial Sequence
  Description of Artificial Sequence: Synthetic polynucleotide
cgtcggttataaattgtagtttgggaacgttttagtcgtattttagttcgttttcggggatcgtcgttttcgaagcgtaataataagtaatgtagtttgtttatttattttcgtatagatttttagtttttttcgttttttagtagaaacgtttaatagaatcgttaggattagcgagtacgcgtattttagtcggtttcgtttaataggttcgaggcggagaaatcgttttagtagttttttcgtttcgttacgtgtaggcggcggttgttgcggaggcgtagcgggttggcgtggttttttggagcgcgaggcgcgttttgttttaaggtttgtatgattgtcgttcgcgcgtttttttttttttttatcggttttcgacgcgcggagtttttcgcgttgggttttttgtagtttagggatggggttgagtggcgttttttcgtttggtgtcgtcgtcgggtttatagttcgatttcgttattgcgtcgttttcgggttcgcgttgatgggcgcgaggcggaaggattggattcggggttgttatcgttgtagttagagtattatttgtaggtggtagttgtagttcgggtttcggttggggttggcggggtttatttgggatggttttttggtttttgagtgcgtcgtttattcggtcggagggtgtacgttttttgtaattcgggtcgaagtttatgtttagcgtttttgttgtagattgtttgatttgtcgttgtttcgttggtttcggggttcgtacggttggaggcgtagttttggtcggggatttttaattttcggcgatttttggttcgtgtgttggtggcggttgtagttgtagcgtcggtgggttgacgtggtttttcggagttgcggttcgtcgcgtttaagggttttataggttgcgtcgtttttgttagttgtttttgatttttgttttgagcgtaggatttggggtttggtattttgtagttatagggatgaggttaagcgtcggttttcggtttcgtggcgtcgt

SEQ ID NO: 861 - DNA, 1281 bp, Artificial Sequence
  Description of Artificial Sequence: Synthetic polynucleotide
cgcggtgtcggcgcgttagtagttcgcggttaaggttatttgtttttagggtttcggtatttttgcggggaggcggtaggtagaggacgcgcgcgtagtcgcgtaggagtttttaggcgagtgggggaagtatcgtaagagacgcggatttggagcgcggttattgcgttatcgtagcgatttgggttatttaagtcggcgggattgagaggtcgttgcgcgtgggtaggggtttagattgcgttcgcggtgtttgtttcggtttttatttcggaacgattgtagttttgcggggttcgtcgtttatatcgcgttgaggacgttgtttaagttaggcgttcgttttcgttcgcggttttagtcgttcgtagcgcgtcgtttttagacgcgcgtggttgttggcgagggttgagatcgcgttttcgtcggttagtttttagtagtagcgtattttttttgtttcgcgttttcgtttcggattcgcgtcgtcgtagtttcgcggtgatgagtttcgagtcggtttcgtcgtcgtcgtcgttttagtgttttggttgcgatcgcgcggagtcgatcgtttagcgtttagaggagggcgacgaggtttttcgcgcgggcgattacgagatggtagtcgagttttttcgttttatgttagtcgggttggcgtagtcggatcgcggtttgtgtttgaggttgggggacgcgttggttcgcgtcggtcgttttttcgaagttttgggcgcgtttcgcggcgtcgcgcggttcggggcgttgcggtcggaggagttggaagagttggcgggcggtttggtgcgcgtcgtgggtttgcgcgatcggtcgttgttcgcggagaattcgggcggcgagttcgaggcgttcggcgagggagggtcggtttcggagtttcgcgcgtttcgcgatttgttcggttgttcgcgttgtcggcggttgttgtataagtcggtgacgttgttttgcgggtttatagtttgtaagcgttgcgtggagttagggttcgcgcggtcgtaggtgcggcgcgtgaacgtggtgttgagcggtttgttggagaagtgtttttcggtcgagtgtcggttgcgtaggttggtaggttaggcgcggagtttgtagcgttagtagtagtcggaggtcgcgttgtttaggtgcgattaggttttggagttgggtgagtcggttgcggggcgggttcgttttttttatatttgttcggtttagtagcggggtggggagttggtcggtgggttcgaggttttgggttttcga

SEQ ID NO: 862 - DNA, 2029 bp, Artificial Sequence
  Description of Artificial Sequence: Synthetic polynucleotide
cgcgaaaagtcgagtcgttgttggagtttagtcgcgtgcgttttttttattttacgttagtaataagttgggagggtgttcgtttttagtagttttcgtagcgtatttcgaataaagatttttagtttttttattttagcgtttgggtttcgcgggtttatagttaatttttgatttaagtgtagttttttttgttcggagtttttaattgatgtaaacgtgagcgtatttgtattcggtttagcgtagtttttttttttttttttttttttttcgttagggtgtttcggcgttttcgattttttaattttggaaaaagagcgatatcgaagttttaattattttagattagggatagagacgagatggggatttacgacggtacggttatgttatagatttttaaagattaaaataaaaaggggttggcgggtgtagacggacgggaaagagataggaataatttttagtttacgtagggtattttatttgtgtagacgcgatatatttaaatttaatatattattaaagttagcgttttttcggttttatttaatcgttaatgtttcgtcgttttttaagtttcgtttcgtttagtagattacggatgtttgggatattttttttttatttttattttataaatatatattcgtttttttaaaagaaataagaaagtagagggaaaatttcgttcgtttaaaggttattcgtttgttcgggtcgttttggttagcgagcgtttcggttataggaggacggggttcgaattcggtgagcggtcgttaggagcgtagtagatttttttagcgtgcgttaatggggaattaagaggttttattttttggtttcggtcgtttttttttttttcggtgggtcgttcgtcggggtttttcggggtatttttagtttttatttttttgttttttttttcgcggttttttattttgcgtattttttcgtcgggtttcggagcgtacgtagaggttttaatttttcgtagagttcgtggagaagtaggagagtttggaattggggcggggcgggggagggtgagaagagggaggcgcgggagtttagtttgggaagcgggaggcgggcggagcgcgtattggagttatttttttcgggagggtttggtcgcggttgtcgatttttatttggttcgtcggttgcgtttggttcgttttggttttcggggtgggttgcggtttttgtttcgcggtcgttatcgtcggcggttcgcgttggcgttcgttttttcgcgggcgttttagattcggggatcgttatttggtagcgttcgtaggttacgggcgttcgtcgttttcggaatcggcggaagggacggggtggggggagcggaggggcggggaggggaagaagagcggtatcgggcgggtttttcgtcgtagggtttttttttcggttatcgtagattttttgatttttcgtttttttcgtttttcgttatttaaagcgtagcgagtcgcggcggcgaggcgagattaagcggtaagttagtgtagcggcgagcggcggggtttcggtttttgatcgagttgcggcgacgtttcgtgtttttttttcgtagttcgcgttttttatcgttcgttttcgggggtttttcgcgcggtgtttagcgcgttaggtggagtagtcgggcgtcgcgtttcggttttttttcggtaatcgtagtcggggggggggagagttcggagcggcgcgagagtttttaattcgcgcgtttacggtcgtcggttttcgcggttatttcgtttttcgtaggttttcgttaaaattcggagaagcggagcgcgttcgtgcgaagtattgggtggttttagtttcgttattgcgcgcgttttagcgttttagaaggtagggggtagttcggggatcggggtttcggagtttcgtgggaggcgggtaatatttgtcgggattcgagggcgtgtttgagattgtggtttgaggtgttgcgtttttcgattcggggtagcgggcgttttgtagttgcgtttttcga

SEQ ID NO: 863 - DNA, 1793 bp, Artificial Sequence
  Description of Artificial Sequence: Synthetic polynucleotide
cgtttaaaagcggagaaggcggagttttaggtttagtcggcggtatcgttgggaagtgagggcgttttggacggcgagggtaatttttattagtttgattgtttgaaatgtagtacggcgttaggcgttttttagatttttttgtgattttaataggttgtgattttggcgtgggggtttggaatacgtgtgggcgttggtgcgggggagagggaatggcgacgcggaagagtaggatagacgcggagggttagagagtagttttattaagtaagttggtggagggttgtgggttttattattttcgggttcggcgttagggcggaaggttcgggggtgtcgtttaggttacgtcgacgcgagcgaagttttggtttatgtttaggttgttttttacgtatatttcgtatttgtcgttgttttgaggcgtggttcggcgaatggttagcgtcgtggtggtgttgtcgatttcgaagaatattttgcggaagggcggcggggaggagggcggagtcgtggttagtatacgggcgtattgggcggggttttttagttagttttgtttttcgttgtttagttttcgttttcgttattttagttagatttttgggtttagttttatttaggttttagttttaggttttggtcgtgtcgtaggtttcggttttcgtttgttatttttttcgatgtttttttcgtttttggtttagtttacgtcgggcgtaggtttttttaggattttcgtagttagcgttacggtggtgtttttgcgcgttttagtgttgtcgggttttttttgaattttcgtcgggattagcggaaggaaaggggagcgaaatttcgtgaaggattcggagatgaggtagggtattattttatcggttaatattcggtattaaatatagatgtatttaaattcgtagtgtgacgttgagtaaattattagtttttttggttttatttttttggttgttaaagggatttatttttgttttttttatttttcggggtcgaatagaggattaagagagataaggcgggcgaaagtttttgaatgtttatatatttcgcggtgttttagagatcgtttcgggtagtggaaattgttagagttgggagttagaagattcgggtttaattttggttttgtttttggtttgttgtgtgattttggggattcggagtcgcgtgatggaagtttatagttgattgtttagttcgggtggagttggatttcgaggtagggaaggacgtatttggttggcgcggcgatgcgttttaggtcgtgtttagagttgggttggcggggattttgtagttaggtttagaggtaaatacgcgtagttggatcgggttgcgggttttggttgagtggtgttggtttgcgttttggcgttgcgttcggggcgcgcgtattttttacgaggatgcgcgtcgagtcggagtattggtcgaaggggttggtgacgttgatgttgtattggtttaggtttgttagttcgtcgtcgcgtattattagtgttattacgttagggttttcgaagacgtagcggtatttgggatcgttacgtagttttttgtcgtttttattttagcggatgaatgggttcgggaaagtcgaaatgcggtaagtgagtttggtcgcgttgttttcgattagtattacgttttttagcggttttagtattcgcggcggttttttttcgcgtagtttttttcgggatttattcgcgggtcgagttagggtttagagtttttaagataggttcggttatagtttttatcgcgagcgt

SEQ ID NO: 864 - DNA, 2697 bp, Artificial Sequence
  Description of Artificial Sequence: Synthetic polynucleotide
cggttagtgaaggtgcgttttgcgttagggattgtgtcggtagatataggtattattgatatcgtttttagtttttcggaggagttttcggttttttatttttagttttagtttttttttagtcggttggtgggcggttgggagtggggatattggatcggaggggattttttacgggagtattcgttgtttttattcgtttcggaacgcggttggattcggagttttcgatcgtagttcgcgtacgattttcgggagtttgttttcgcggtcgtcgatttacgttcgcgttgtcgttttattgttaggtggttcgagagatgtaggaggaaggaggggcgcgcggggcgggcggaggagggtggagtcgtcggcgcgttttttttttcgggtcggtaggcgggcggcgcggcgggttcggcgcggcggtagaggaggcggcgggcgttgggagatatcggacgttcgttcggttgcgttgcggtttaggttttcgttcgggttcgattcgttcggttatcgtcggttcgggcgcgtatttgtcgggtaagtggcgttcgagtttttgtcgttgaggttattatcgcggttattttcgtcgtcgtcgtcgttattgcgcggagtttttcggttttgtttgcgttttttcggttgcggtttcggttgcggttgcggttgcggttttcgggttcggttttcgggtttcgcggattgcgtcgtacggcgtcggggttcgggggtcgttagttagttcgtttttcgtcgggggtgaaatttcgtttaagtttgggttttggggagaatttgttgaagttaggagtggttcggggcggggatagagatggtgggagtggggggagggaattcgtttcgggttttttattagggtcgtttagtgggtgggttgtgtgttcgttattttggggcgttggcgcgcgtttttagggaaggggcgagtgggtcgtcgggttatcgagtagaaggagttagggagcggggttggcgtggtcgatttcgcggattttcgcgaggataaagtttggttttttggtcgttttgcggagcgtttgtttgggtttagcgcggagagttgaaagtgtcgtatagacgcgtttttgatcgtatttttttattttagttttcgtttttttttttattttattcggttttggttggggtaggtcgtggaagagaaaggcgaaggggaagagggacgattttttaatgaaggtttattacgtgttaggttttttgtttggcgttttttgtttttaataagagtttttttaattttgcggtttttaagtgtgtgtagggaggggataggggggaagattttattgtgtattcgggggtggtggtttcgtcgaatttttatagtttttggttttcgtagtgaatgaggttcgcggttggggtttttgtatttaggtttgtgttttttttcgcggtgattttgagttttattcggttgcggcgttttttgagtttgttttcgtttttttcgtagttgcggttttagggttatgcggaggtttacgaggaggtcggcggttacgcgtatttcgtagtttaggtggtttaggtttgtatcgcggcggtttcggcgttatggagttttcgtattcgttgacggcgtattacgatgagttttaagaggttaagtacgtgagtcgttgcggcgcggggggcgcgcgcggggtttttttgttttcgggtttttcgttgggcgttgcgcgtagcgttatcggggttcggttcgggttgtcgcgttggaatcggcgcgaggtgtgtttgttgtcggggttggtgttcgtcgtcggtttttgcgttattttggcggttatgttggtttttaagtatttgggttcggtcgcggtcggcggcggcgtttgtttcgagggttgttttgagcgtaaggttttcgcgcgcgtcgttcgttttttggtcgttaatttggacgttagtatcgatttatgttaggatttttattcgttcgtttgcggcggttggttgcggcgttacgttattttcgacgataagtttatttatggtattatcgcggttatcggcgagtaaaacgaggagcgtttacggcgtttgttggcgcggttcgggggtgggtttggcggcgcggtttagcgtaaggtgcgcgttttttttcgttcgtgtttcgatatgcgcgagatcgagcgattgggttcgcgatttatgttagaggttatcgaggattgcgggggttgggatttgggcggcgcggaggagcgttcgggggtcgcggcgcgatgggattttaatcggttgttgtataaggcgtagggcgtgtatagcgtcgtcgcgtttttttcgtttacggttagtttggacgataggaatttttcgcgttacgttattcgcgtgagtgcgttttttgagcgttttgttagcggtcgcggattcggggcgtagtggttttgtttaggggtttttgcgcgcgggaggcgggtgcgtgagaggagaggagggaagagacgagtaggagaggggaggggaggggagcgtatagaggtagagcgcgggaggagggcgtaagtaatttttttggggtaattgcggtgtttagaggagtcgcgggagtcgtaattttttagttttttggtaggtagtgagggttaggagggagaggcgcgtcggcgggttgggttgacgttttcgcga

SEQ ID NO: 865 - DNA, 1384 bp, Artificial Sequence
  Description of Artificial Sequence: Synthetic polynucleotide
cggaagggattcgtcggttgcgtttcgtttaggttggtcggggtcggtgtgatcgtgtgatttcgtgtatattgcgttcgggttttcgtgaatgatagtagtttgtaatttttagtcggagagtagcggtggttatcgtcgggcggaaagggttataagttagaatgtaaagcgatttcgtttcgggtgtgggggatttcgggttttcggttattttcgaggtcgggcgtgttttgttcgttttttttcgttttgggcgtcggggcgattttattttgcgttttaagttgggggttttttatgttcgtcgtcgtcgagtttttcgtcgtcgaggcgttggtcgcggttttcgggttcgggtcggggtcgtcgtcgtcgtttagtttcgttagttttcggttggtggtcgtgagttcggttcgtaggttggttattttttggttggtcgattggatcgttttatcgatgcggagcgcgagttgtttattgttttttattatgtttaggattttggtttgggggcgagagaggtgataaagagttgtatgatgcgcggggggcgcgcggtcgggtattttcggttttatttgttgtgtttttcgcggttcggtttcgttcgcgtttcgatttttaggtatcggtagcgtcggttttttcggtataggaatgatagcggcgtttttagttttagtcgcggcggtggcgaggcggcggggggaggaggcggaggagaaaaaagaggaggagaaggaggaggaggagtagcgatcgtcgagatttcggcgggcgggcgtcgagagttgttttaagaaggatatcgcgcgttattaggtattttttaaatggagtttattattcgtcgtcggttcgggagggggtttcggtcggaggttgggggtatttttggtttttcgcgttttcgtatttcggagatatatttttcgggggggcggaggcggcggacggtagtcgggagggggttaaggtggcgtttttggcgaggggtaggggtcgtttggatcgaggtcggttttttgtttttttttttgagcggtggggtagttttcgttttggagaattggtgtttcgagtcgtgttaaggttggggaggtgttgggtgttcggaagagagggtgtttggaaagggggttttagaggggagtcggggtggatttttatggaagggagacgtttgcgttagtttaggagtggagttcgtgttttatcggttttttaaattgcgagtacgaaatttttagaggggagttgagttggtgtttcgcgtgttttttattttttattttttattcgtaggttagatttgcgttgtttattttaggagggagcgtttatttttttcggcgtgggtcgttggtgttttcgt

SEQ ID NO: 866 - DNA, 421 bp, Artificial Sequence
  Description of Artificial Sequence: Synthetic polynucleotide
cgagcgggtagttttggaaggcgttttgtaagttcgttttcggttacgcgcgtttttcgggttttggtttcgtatttttgtcgtcgtttttacgcgtttttacggatttcgcgcgtttttttttttcggatcgcgagcgtatttatcgatttcgattgtttcggttcgtttcgaagttttcgcgttgtagtttttagttttaggagtagggtttttgggtttacgtttttaaggtaattattttttaggttggttgtgacgttataaaggtcgcggaggttgggcgtttgagggttgggtttgcgggtcgcgggatagggagggcgcggggtcgggttgttgggttcgagttttgggtacgatgttttttttgacgtcgttaggatagcgtttggtttaggtttgggtttggtgaacgcgg

SEQ ID NO: 867 - DNA, 2606 bp, Artificial Sequence
  Description of Artificial Sequence: Synthetic polynucleotide
cgtatttttacgcgtaatagagttaaaagtgttggggcgggagcgggggtcgggaggtaggggaaagcggtcgggggaacgttggatttgggttttaagtgtaggtttgggttttaaatgttttatttttttttttttgggggcgggtaagggatagggaggttgtcgggattacggatgggtagttacggtggagcgtcggcgacgcgcggaggagtttagttcgagtggggttcgtttgtattggcgtcgtcggtttggcgggacgagttttcggcggtggcggaggtggcgttagggttttcgttttcgatggagttttcgttgttcgtgttgtcgtttgatagtaggcgcgttattcgtaagtcggtttgtagggtgcgtacgtcgttgtcgaagttgagttcgtttaggtcgttaataagttgcgatagtttagtttttatgtcggaggcgttgtttagtagtagaggcggcggttcggttttcgggtttagggagttttcgtcgttttttagcgtttttttacggttattttttagagtatttaataagttttcgtatttaaagtgtatggcgattattagcgtacgttgcgtttcggtttttttttttgttggatttttttttgtcgtacggttttttttttttttcgggtagttttcgggttgttttttttttttttttttttgtagtttttgttttagttgttcgtcgagtaggttttcggtgatggagttaagtttgggcgcgttgcggttgcgttttatcggcggtttatagtagtagggttcgtgtaggagtagtttgcgtagcggtattagcgggatggtgtgtgcgtttattagtttttgttgttggtgacgcgcgtcgtttcgtcgtttgaggcgtttaaatttcgttagcgcgttggtcgacgtttggtagagtagtagggttatggtttgcgttttttcgggtttggatattagtacggcgtggtagcgtagtattacggttttgtgttttagttcgtgtcggtatatttaggcgaagattttgggtagtcgcgcgtcggttacgtagtaggtgacgcggtgtagtaggtagaggtggttcgggcggcgtagcgcgcgtttttcggcgtgtattatgcggatattttgcgtatttatcgttagttttattttggtgttttgacggttcgtttcgtttttgttttagattttgtttatagtaaggtcggtgtagtcgtcgtcgcgcgtttggatggtggtggtattgtttaggtagagtacggtgtaagttgggttttcgttagtgatgtgtagttttttgcgtttggagcggaatatgttgtttattcggttaagcgcgttttcggggtacgttcgcgttagcgagttgagcgtcgagtagtgtaggtttatagcgtagtttttgggtttggacgtttgtcgcggcggcgtttcggttagtagttcgaatttgtgttttttttacggtagtattttcggagggcgtttcggcgtagttgggcggcggcggcggcggagcgtcgggtgcgaggttcgttgagttatcggtttttgttaggttcggttcgggtaagatcgaagaataaaattattgggagcggttttgtggtagggagttggggggaggggagtagagagagtgtttaggaatttcgtaggaggtgcgggtaaattttttaaaaaagaaaatatttagtttcgagtgtgtaaaaaaggttggtgcgggggagatacgcgcgtatatagaattattttagtttgggtaagggcgagagtaaagagttttaggtaagtaataaaatgtaagggagaaagaacgagcgtagagtggaaaatgttaggaaaaaagttagaagcgcgcgtgtaaataaagagagttttagtaatagtattcgggatggtgtaagaatatgtaggaatttttcggcgaacgtgaggtgggttttttaatatatataatttttaggattggggttaaaattcgcggaaattttatagcgagtgtgtttaggggtcggtgttttttattttcgaggggtgttggagatggaaagtttttcgtttgggttggttttaagttagtagttcgtttaaagtgcggtcggatgttgggttcggttggtcgcggcgggtttcgcgtagtagtttcgcggggatttattgtattttcgtttcgtcggacgtcggggattcgcgttcggttcgtttagtgttcgggttggtttggtcgagacggcgttgggtttcgagaataggggacgggtatggtcgggttcgggaatcgtcgttattttatttttttttttcgaggcggtgtttagtttcgttttcgggttttttacggtttgttgttcgtttttgtagtgcgtttttttcggtgttgcgagcggcgttcggttcgtttgttttatatttttgtcgttcgggaggaagatttcgggtaaatataggtcggcgcgaattattcgtcgcgcggggataggggaggagtagagaagaggatttgttttgggtttcgatttcgggcggatttttggttttttaaagggatcgcgtgatagttattggtcgagggagcggggagatcgg

SEQ ID NO: 868 - DNA, 1094 bp, Artificial Sequence
  Description of Artificial Sequence: Synthetic polynucleotide
cgggttattcgcgtattgaagatagtttttgtgttttcggaacggttttgtcgagcgtggattagtaggagcgaggcgggtttagatgtgagacgtgtggggcgggttttttaattaagacggttcgtttggtggattttagtattcgagtttgttgggttttaattattttttttcggttttggattgcgttagagtttcgcgttgcgagtttaagtttttagaagtttttagggtttcgaaagcgtttagaagggaatttaaattatggtagcgtttagaggtatcggttttagttttattggatgtgtgtgggtcgaggttttcgggtaagggcgagattttcgtcgtgtgggggttttcgaacgcgttttttcgattcgggtattagcgaagtgtttaagaagtgttattggttatttacgtttagtagttttacgttgggtgtagcgttttagttttttttaattttttcgtgtcgtttttcggttaggttggttggtcgtgggcgttttatttttaggaagtcgtcgttttgatagtcgatggagatttggtcgtagtggatggtaatgaatttttcgggttcgttgatgaagaaggttgcgtagtgtagttgcggtcggtcggcggtgaaggtgaattggttttggaggtttagtatgtttaggtattttgggggaggagggtatggggtaataagtttcgggttgtagtcgtcgtagcgtcgttttcgggcggtcgtttttcgcgcgttttattttcgggttttgtagtgtttagcgtttcgatttttagtttaggttgcgttgggtttttgcgtttcgggcgcgttattttttttcgtttttggcgcgttttcgcggatcgatttttagttaaggggatcgcgtttttggcggtttcggttagtttttttttcgagatgttcgcgagttttttgtttttcgtatagagttttatttttttcgcgtttcgggcgttcgcgagtcgggtagtttcgatttacgtagagcgcggcggtacggttgttttttagttagttttcgttttaggttggcgttgaagagtaggaaaggatcgtagttcgtcgt

SEQ ID NO: 869 - DNA, 2168 bp, Artificial Sequence
  Description of Artificial Sequence: Synthetic polynucleotide
cgcgttataaacggggatttaatttattgttcgatttttgttagaggcgatttatttgcgtttttgttatcgtattttcgttcgcgtttttgcgttttaggtttttcgttgttttttcgttttttgtagcgcgggagcgttgtttcgtttggtttgttggttttttttagattttggttatttttttcgtggtaggaagggttatatgtattgatagatttttcgttggtggtggttgggtggtggcgaggcgtgttttcgggcgcgtttaaaatttagtagttttttttaagtagtagttttttttatttcgtttttaggattgaggatttagttttcgatgtttttttattttttttcgttttatttcgttattattttttaatttttttagtatatttttaagttttatacgggcgtttgttttttttttgtattttttagttttcgggcgtttcgttcggttgaagtttacgtattttgggatttaattgtttttaattattcgcgtagtttaagtttcgcgtttgtttggttttcgtttcgggagtttgaagttatcgggtagtttattgggtgttttcggggaaaaggtttaagttgtagagatgagagaagtggggttgggggaggggagaggttttagaaggaagattacgaatacgtgcgaagaaataaaagttattacgtgtgtacgcgcgcgggggtttaagggcgcgagcgcggagtacgttttagggggttagggatagtggttttttgtagcgggtatagtagggggcgcgggtatttatacgaaagcgtggtagatgaacgtttagtcgcggggtttttttagtacgttgtataggtagttttgtattcgtcggtatttgacgttgcgtcggtagttttggttattcgtgtaagagagcggtttttttagtaggtttattcgggttttttgtttgtttcggcggtttttttttaggttatcgtcgtcgttatcgagcgtggtcgcgcgggtgtttagtagtagtaggtcgtcgtttttggcggttgtcgagtttagtagtattttgtttcggtcggattttatattttttatgtcgttgtttaagcgtttttcgttcgtcgtcgtcgtcgttgcgtcgttttttatttagagttcggcggcgtcgttttttttttttttcgcgtggtggcggggtatggtattattacgggtatcgcgagggggtcgttagcgtttgcggcgggggtagcggttttatgtgcgtcggcgggttttaaggaggaagtcggcggtcgacggggcgttcgttagttagagatttttgagtcgggggcggggaagtaggtagttagtaaatcgttcgggtttcggggcgggaaaggaggggttgtagaggaggtcgaggagttttaatttttaatagtttttagtttcgaattttaaattcggatttgtttggggcgttattttgagagggttttttttgtttttttattttcgcgattattatttttttttttttaaattgttttcggggatagagtgggggagtgcggggcgtttcgaggcgcgtttttacgcgcgtatatttagttttaggtttttttttttttttttttattttttacgttttgtagcgaaacggttttagaagttttttttcgaggcgcgagttcggtttggttttggtaggggttttgtagttgttcggaaggtgaagttagttttgtgttttgaggagaaattggagatgtaggtcgttgtgttttttcgttgttacgtcgttgcgtcggattttgttattttttcgtaaggggtgagagcgggaatagttttgttttgttttttaggtattatttagtttggaggttggagcgtaaggtaacgtttcgggaagtggtattcgggttttcgtatacgggcgagtttttagtagtttagtggatagattcgtaggacgcggttgttaagttcgcgaggtaaggattaggtattttttcgcgttttattttagtttgcggattgtgattttttattttagtattagataagttcgcgagtaattgaatattttttttagtttatgggtggggtgtggaaagggcgtaaaattttaaagtggttttttcgcggtgagcgagttgtttcggggttttgtttgattgtagcgcga

SEQ ID NO: 870 - DNA, 1204 bp, Artificial Sequence
  Description of Artificial Sequence: Synthetic polynucleotide
cggggtttgacgttttgatttcgggtcgttggtcgggggcggagacggggatagcgagttgagtgtgcgagcgttaggggttttagttgtacgttttaggttttttagcgcgcggtaggtcggggcgggacgaggagagttgcggggataacgtttgtggttgggttcggaggtgcgggtgcggcgcgggataagcgggtagtatgtttagggcggtcgggagtttattgcgttttggtcgcgggttaatagttcgttgcggtttcggggcgtttttcgaggttacgcgacggttcgtatcggttttttcgtttcggggttttttttgttattttagcggcggggtttttagtaattttgggttttaaggttacggtgagttagggtttcgacggggaggttttgggagggaggaggttgcgggagggtagcgaggggtcggttcgggagtcggtttgagggcgcgttgattttttgtgtcggtgcgttagttttcgcgtttatttgggttgttttcgttgtaggggagatttatcgagtttttacgtagcgtaggttttcgtagttcgataagaaaattttgttgtggatagggcgttttaaatcgatggaggagatttcgtttcggatttcgtaagtgtggcgatcgtcgcgcgaaggagagtcggttttcggtcgtaagggtgcggggtgatttatttttcgatcgcggttatttaggagcgaaagcggtcgtagtgttaatatttcgtaatattatttattatatacggagtttatttatatatatatttcgtttttagtgcggtgtgttaagagttaattaagtttatagggagattgtagaaggtgggtgaaaattgagaggtttaggggatatttttagtatcgtttagattgtcggtttttagtaagtttcgaattgggaggtagtggggtttttgtgttaaataggttacggttttcgcgagtattcggatggttgtcgggacgttagatcgtaatttaggttttggtcgggggcgtttttttattttatttaaggaaggggttttttgattttggtttgcggggcggttgtggcgggggggtttttggaaaaaagacgtatttatgcggtttttttttttggggtaggagacgtttggcggacgtgtttttgtagttttttaggtttcgggtttatttagggtgggacgcgcgg

SEQ ID NO: 871 - DNA, 22 bp, Artificial Sequence
  Description of Artificial Sequence: Synthetic primer
tggagtggtggagttgtagttg

SEQ ID NO: 872 - DNA, 23 bp, Artificial Sequence
  Description of Artificial Sequence: Synthetic primer
tagttgggtatgtttggggagat

SEQ ID NO: 873 - DNA, 24 bp, Artificial Sequence
  Description of Artificial Sequence: Synthetic primer
ggtatttgtagaatgtyggygggt

SEQ ID NO: 874 - DNA, 23 bp, Artificial Sequence
  Description of Artificial Sequence: Synthetic primer
gygtagagtttygtagaggygga

SEQ ID NO: 875 - DNA, 19 bp, Artificial Sequence
  Description of Artificial Sequence: Synthetic primer
gggygtataaaggaggtgt

SEQ ID NO: 876 - DNA, 25 bp, Artificial Sequence
  Description of Artificial Sequence: Synthetic primer
gattgtaggaagtgtgttagggaag

SEQ ID NO: 877 - DNA, 28 bp, Artificial Sequence
  Description of Artificial Sequence: Synthetic primer
ttttagggtttattagggaattaggaat

SEQ ID NO: 878 - DNA, 31 bp, Artificial Sequence
  Description of Artificial Sequence: Synthetic primer
gtgattaagagatttagtatttygggttagg

SEQ ID NO: 879 - DNA, 29 bp, Artificial Sequence
  Description of Artificial Sequence: Synthetic primer
ggttagattaaagtagaattttgggtgtg

SEQ ID NO: 880 - DNA, 16 bp, Artificial Sequence
  Description of Artificial Sequence: Synthetic primer
gggagygtyggggatg

SEQ ID NO: 881 - DNA, 22 bp, Artificial Sequence
  Description of Artificial Sequence: Synthetic primer
gttgaggyggtttagagggtta

SEQ ID NO: 882 - DNA, 29 bp, Artificial Sequence
  Description of Artificial Sequence: Synthetic primer
ggygtttttaagagatagtttggagtagg

SEQ ID NO: 883 - DNA, 27 bp, Artificial Sequence
  Description of Artificial Sequence: Synthetic primer
gattttyggtgtatatttggggattgg

SEQ ID NO: 884 - DNA, 21 bp, Artificial Sequence
  Description of Artificial Sequence: Synthetic primer
ggtaggygagygggattgatt

SEQ ID NO: 885 - DNA, 21 bp, Artificial Sequence
  Description of Artificial Sequence: Synthetic primer
gggygaaygygtagtaggaag

SEQ ID NO: 886 - DNA, 20 bp, Artificial Sequence
  Description of Artificial Sequence: Synthetic primer
gggtygtaagtyggggagtt

SEQ ID NO: 887 - DNA, 26 bp, Artificial Sequence
  Description of Artificial Sequence: Synthetic primer
aagtaaagagatygttaggagggata

SEQ ID NO: 888 - DNA, 27 bp, Artificial Sequence
  Description of Artificial Sequence: Synthetic primer
gggagtygtttgttagttattyggtag

SEQ ID NO: 889 - DNA, 20 bp, Artificial Sequence
  Description of Artificial Sequence: Synthetic primer
gggaagtgygggtggttgtt

SEQ ID NO: 890 - DNA, 22 bp, Artificial Sequence
  Description of Artificial Sequence: Synthetic primer
gtgtgtatgtgtgagggtgtga

SEQ ID NO: 891 - DNA, 19 bp, Artificial Sequence
  Description of Artificial Sequence: Synthetic primer
tggagtygggygggtgyga

SEQ ID NO: 892 - DNA, 23 bp, Artificial Sequence
  Description of Artificial Sequence: Synthetic primer
gagaygaagagaggyggtgagaa

SEQ ID NO: 893 - DNA, 25 bp, Artificial Sequence
  Description of Artificial Sequence: Synthetic primer
agagagtttagggagtttagggagg

SEQ ID NO: 894 - DNA, 28 bp, Artificial Sequence
  Description of Artificial Sequence: Synthetic primer
agtygtaggtggagatattttagttgtg

SEQ ID NO: 895 - DNA, 29 bp, Artificial Sequence
  Description of Artificial Sequence: Synthetic primer
agtttaattaaggatygtttagaggggtt

SEQ ID NO: 896 - DNA, 20 bp, Artificial Sequence
  Description of Artificial Sequence: Synthetic primer
gyggagtttyggggaagagt

SEQ ID NO: 897 - DNA, 20 bp, Artificial Sequence
  Description of Artificial Sequence: Synthetic primer
gygttaggggagtaggagtt

SEQ ID NO: 898 - DNA, 21 bp, Artificial Sequence
  Description of Artificial Sequence: Synthetic primer
taygggagttggggtagaaga

SEQ ID NO: 899 - DNA, 27 bp, Artificial Sequence
  Description of Artificial Sequence: Synthetic primer
gttygggaggygggaagtgggtagtag

SEQ ID NO: 900 - DNA, 22 bp, Artificial Sequence
  Description of Artificial Sequence: Synthetic primer
ggattgggatttgtttttgggg

SEQ ID NO: 901 - DNA, 21 bp, Artificial Sequence
  Description of Artificial Sequence: Synthetic primer
ggatgaggttggttaggtgtt

SEQ ID NO: 902 - DNA, 25 bp, Artificial Sequence
  Description of Artificial Sequence: Synthetic primer
gaggyggagttaggattaggatatt

SEQ ID NO: 903 - DNA, 25 bp, Artificial Sequence
  Description of Artificial Sequence: Synthetic primer
agtttggagagaagttatttyggga

SEQ ID NO: 904 - DNA, 23 bp, Artificial Sequence
  Description of Artificial Sequence: Synthetic primer
tttagygtgtttgggaggtaaat

SEQ ID NO: 905 - DNA, 24 bp, Artificial Sequence
  Description of Artificial Sequence: Synthetic primer
ttgygtygttttgggaagtgaaga

SEQ ID NO: 906 - DNA, 30 bp, Artificial Sequence
  Description of Artificial Sequence: Synthetic primer
aataatttagagtaggttaaygaggttttg

SEQ ID NO: 907 - DNA, 24 bp, Artificial Sequence
  Description of Artificial Sequence: Synthetic primer
ggygttgaaggttygtaggttttg

SEQ ID NO: 908 - DNA, 19 bp, Artificial Sequence
  Description of Artificial Sequence: Synthetic primer
gggtyggagtygtttgagt

SEQ ID NO: 909 - DNA, 21 bp, Artificial Sequence
  Description of Artificial Sequence: Synthetic primer
gagagagttgttagggyggtt

SEQ ID NO: 910 - DNA, 24 bp, Artificial Sequence
  Description of Artificial Sequence: Synthetic primer
gatgygttgttgttgggaattggt

SEQ ID NO: 911 - DNA, 21 bp, Artificial Sequence
  Description of Artificial Sequence: Synthetic primer
agttagagggtttgyggtggt

SEQ ID NO: 912 - DNA, 23 bp, Artificial Sequence
  Description of Artificial Sequence: Synthetic primer
ttggagtaaggayggtaaggagt

SEQ ID NO: 913 - DNA, 22 bp, Artificial Sequence
  Description of Artificial Sequence: Synthetic primer
gttgggagtggggatattggat

SEQ ID NO: 914 - DNA, 34 bp, Artificial Sequence
  Description of Artificial Sequence: Synthetic primer
gaatggtaggttttatttaaagagtgtttggtgg

SEQ ID NO: 915 - DNA, 25 bp, Artificial Sequence
  Description of Artificial Sequence: Synthetic primer
gattgtttyggttygtttygaagtt

SEQ ID NO: 916 - DNA, 27 bp, Artificial Sequence
  Description of Artificial Sequence: Synthetic primer
ggatttgttggatattttggagaatgg

SEQ ID NO: 917 - DNA, 22 bp, Artificial Sequence
  Description of Artificial Sequence: Synthetic primer
tygattgygttygtagggattt

SEQ ID NO: 918 - DNA, 29 bp, Artificial Sequence
  Description of Artificial Sequence: Synthetic primer
gygaagtgtttaagaagtgttattggtta

SEQ ID NO: 919 - DNA, 23 bp, Artificial Sequence
  Description of Artificial Sequence: Synthetic primer
ggtttagaggtttttggttggyg

SEQ ID NO: 920 - DNA, 26 bp, Artificial Sequence
  Description of Artificial Sequence: Synthetic primer
gttttaaggttayggtgagttagggt

SEQ ID NO: 921 - DNA, 23 bp, Artificial Sequence
  Description of Artificial Sequence: Synthetic primer
aacttccacrccatctctacaac

SEQ ID NO: 922 - DNA, 27 bp, Artificial Sequence
  Description of Artificial Sequence: Synthetic primer
atctccctaaacraacatcrcratctc

SEQ ID NO: 923 - DNA, 25 bp, Artificial Sequence
  Description of Artificial Sequence: Synthetic primer
ccactcaacaacrtatctccraacc

SEQ ID NO: 924 - DNA, 29 bp, Artificial Sequence
  Description of Artificial Sequence: Synthetic primer
tctaaccrtttaaaaccraatcttaaccc

SEQ ID NO: 925 - DNA, 18 bp, Artificial Sequence
  Description of Artificial Sequence: Synthetic primer
aactcaccccrcaaccct

SEQ ID NO: 926 - DNA, 26 bp, Artificial Sequence
  Description of Artificial Sequence: Synthetic primer
ctctaccacrtattacccrcaatctc

SEQ ID NO: 927 - DNA, 30 bp, Artificial Sequence
  Description of Artificial Sequence: Synthetic primer
ctactactaaatcttcacactacaaccaac

SEQ ID NO: 928 - DNA, 25 bp, Artificial Sequence
  Description of Artificial Sequence: Synthetic primer
tcacccaacacratcaacctactac

SEQ ID NO: 929 - DNA, 23 bp, Artificial Sequence
  Description of Artificial Sequence: Synthetic primer
aatcctcccatactctaaaccct

SEQ ID NO: 930 - DNA, 19 bp, Artificial Sequence
  Description of Artificial Sequence: Synthetic primer
crcctccraaactccctaa

SEQ ID NO: 931 - DNA, 21 bp, Artificial Sequence
  Description of Artificial Sequence: Synthetic primer
acaaacaccccaaactctcca

SEQ ID NO: 932 - DNA, 25 bp, Artificial Sequence
  Description of Artificial Sequence: Synthetic primer
ttctctaactccraactaaccccta

SEQ ID NO: 933 - DNA, 29 bp, Artificial Sequence
  Description of Artificial Sequence: Synthetic primer
tcctactcaccttaaacttaataacctac

SEQ ID NO: 934 - DNA, 26 bp, Artificial Sequence
  Description of Artificial Sequence: Synthetic primer
ccraatccractttaaatacccaaca

SEQ ID NO: 935 - DNA, 26 bp, Artificial Sequence
  Description of Artificial Sequence: Synthetic primer
tcctaaaacccttacrtcccraaaac

SEQ ID NO: 936 - DNA, 23 bp, Artificial Sequence
  Description of Artificial Sequence: Synthetic primer
taaccaccacctcrcttcattcc

SEQ ID NO: 937 - DNA, 25 bp, Artificial Sequence
  Description of Artificial Sequence: Synthetic primer
caaaatcccaccacacttctaaacc

SEQ ID NO: 938 - DNA, 24 bp, Artificial Sequence
  Description of Artificial Sequence: Synthetic primer
actccccaacctaatctactaaac

SEQ ID NO: 939 - DNA, 27 bp, Artificial Sequence
  Description of Artificial Sequence: Synthetic primer
cctttacaaccactatcttcctcctcc

SEQ ID NO: 940 - DNA, 25 bp, Artificial Sequence
  Description of Artificial Sequence: Synthetic primer
aacttcctcaattacatcctacatc

SEQ ID NO: 941 - DNA, 25 bp, Artificial Sequence
  Description of Artificial Sequence: Synthetic primer
ctttctaaacrcccccaacraatac

SEQ ID NO: 942 - DNA, 24 bp, Artificial Sequence
  Description of Artificial Sequence: Synthetic primer
ctacaaacrcracccaaaacccct

SEQ ID NO: 943 - DNA, 30 bp, Artificial Sequence
  Description of Artificial Sequence: Synthetic primer
cctaaacaaaactcttaaaatatccctacc

SEQ ID NO: 944 - DNA, 23 bp, Artificial Sequence
  Description of Artificial Sequence: Synthetic primer
aacctttcccaaaccaccataac

SEQ ID NO: 945 - DNA, 26 bp, Artificial Sequence
  Description of Artificial Sequence: Synthetic primer
ttcraactcaccctcaaatttaacca

SEQ ID NO: 946 - DNA, 20 bp, Artificial Sequence
  Description of Artificial Sequence: Synthetic primer
caaccccaaccaaaacttcc

SEQ ID NO: 947 - DNA, 23 bp, Artificial Sequence
  Description of Artificial Sequence: Synthetic primer
ctcraaaacccctcctctactac

SEQ ID NO: 948 - DNA, 20 bp, Artificial Sequence
  Description of Artificial Sequence: Synthetic primer
ctaaccccrcttacccacca

SEQ ID NO: 949 - DNA, 29 bp, Artificial Sequence
  Description of Artificial Sequence: Synthetic primer
ccctcccaactatacrctctcraaacacc

SEQ ID NO: 950 - DNA, 23 bp, Artificial Sequence
  Description of Artificial Sequence: Synthetic primer
crtccttccttctttttaaaccc

SEQ ID NO: 951 - DNA, 25 bp, Artificial Sequence
  Description of Artificial Sequence: Synthetic primer
ccctcaaaactcaaactccaaatcc

SEQ ID NO: 952 - DNA, 25 bp, Artificial Sequence
  Description of Artificial Sequence: Synthetic primer
acrcacttaccraatcaccttatcc

SEQ ID NO: 953 - DNA, 22 bp, Artificial Sequence
  Description of Artificial Sequence: Synthetic primer
acrtccctaatcccaaactacc

SEQ ID NO: 954 - DNA, 24 bp, Artificial Sequence
  Description of Artificial Sequence: Synthetic primer
crcrcraatacraaaaccraacaa

SEQ ID NO: 955 - DNA, 28 bp, Artificial Sequence
  Description of Artificial Sequence: Synthetic primer
ctacccaatttccaaaattcttcatacc

SEQ ID NO: 956 - DNA, 23 bp, Artificial Sequence
  Description of Artificial Sequence: Synthetic primer
ccccatatcrctacccaacttac

SEQ ID NO: 957 - DNA, 30 bp, Artificial Sequence
  Description of Artificial Sequence: Synthetic primer
ccttaatttcttccctttaaatccraacac

SEQ ID NO: 958 - DNA, 16 bp, Artificial Sequence
  Description of Artificial Sequence: Synthetic primer
ccacccccacttccac

SEQ ID NO: 959 - DNA, 22 bp, Artificial Sequence
  Description of Artificial Sequence: Synthetic primer
acctaccttcrcacaaactctc

SEQ ID NO: 960 - DNA, 25 bp, Artificial Sequence
  Description of Artificial Sequence: Synthetic primer
aaacrattacaaccctacraaactc

SEQ ID NO: 961 - DNA, 29 bp, Artificial Sequence
  Description of Artificial Sequence: Synthetic primer
cttcaaactcraaaaccrtcacttaacaa

SEQ ID NO: 962 - DNA, 29 bp, Artificial Sequence
  Description of Artificial Sequence: Synthetic primer
atactatactaacccaaatctaccaactc

SEQ ID NO: 963 - DNA, 26 bp, Artificial Sequence
  Description of Artificial Sequence: Synthetic primer
ctcctacatctctcraaccacctaac

SEQ ID NO: 964 - DNA, 26 bp, Artificial Sequence
  Description of Artificial Sequence: Synthetic primer
caacracrcctccaaccctaaccrcr

SEQ ID NO: 965 - DNA, 22 bp, Artificial Sequence
  Description of Artificial Sequence: Synthetic primer
tacccaaaactcraacccaaca

SEQ ID NO: 966 - DNA, 26 bp, Artificial Sequence
  Description of Artificial Sequence: Synthetic primer
ttaccraaactaaactcrcccaaatc

SEQ ID NO: 967 - DNA, 21 bp, Artificial Sequence
  Description of Artificial Sequence: Synthetic primer
crcccactacrtactaccttc

SEQ ID NO: 968 - DNA, 26 bp, Artificial Sequence
  Description of Artificial Sequence: Synthetic primer
ttaccatccactacraccaaatctcc

SEQ ID NO: 969 - DNA, 22 bp, Artificial Sequence
  Description of Artificial Sequence: Synthetic primer
tacrccrctcttcacccaaaac

SEQ ID NO: 970 - DNA, 25 bp, Artificial Sequence
  Description of Artificial Sequence: Synthetic primer
aaactcrataaatctcccctacaac

SEQ ID NO: 971 - DNA, 30 bp, Artificial Sequence
  Description of Artificial Sequence: Synthetic primer
gttggttgtagtgtgaagatttagtagtag

SEQ ID NO: 972 - DNA, 26 bp, Artificial Sequence
  Description of Artificial Sequence: Synthetic primer
gatgtatagaggtaayggttagggga

SEQ ID NO: 973 - DNA, 30 bp, Artificial Sequence
  Description of Artificial Sequence: Synthetic primer
ggtagggatattttaagagttttgtttagg

SEQ ID NO: 974 - DNA, 20 bp, Artificial Sequence
  Description of Artificial Sequence: Synthetic primer
ggaagttttggttggggttg

SEQ ID NO: 975 - DNA, 21 bp, Artificial Sequence
  Description of Artificial Sequence: Synthetic primer
gtggtgggtaagyggggttag

SEQ ID NO: 976 - DNA, 30 bp, Artificial Sequence
  Description of Artificial Sequence: Synthetic primer
ggtygyggaggatataataggtagagtygg

SEQ ID NO: 977 - DNA, 28 bp, Artificial Sequence
  Description of Artificial Sequence: Synthetic primer
gtttgttgttaggygatagtaygggtag

SEQ ID NO: 978 - DNA, 26 bp, Artificial Sequence
  Description of Artificial Sequence: Synthetic primer
ctaactaccctcctcaaacacaaatc

SEQ ID NO: 979 - DNA, 23 bp, Artificial Sequence
  Description of Artificial Sequence: Synthetic primer
aaccrctataccrctactcaccc

SEQ ID NO: 980 - DNA, 20 bp, Artificial Sequence
  Description of Artificial Sequence: Synthetic primer
atccccrccaactaacaacc

SEQ ID NO: 981 - DNA, 25 bp, Homo sapiens
caccaatacctacttttccacrcac

SEQ ID NO: 982 - DNA, 28 bp, Homo sapiens
catctcaacttttaaacctccctaaacc

SEQ ID NO: 983 - DNA, 28 bp, Homo sapiens
cctaactaaccractaaaccrccccatc

SEQ ID NO: 984 - DNA, 28 bp, Homo sapiens
ctcaacccraataaaactcrtctacact

SEQ ID NO: 985 - DNA, 228 bp, Homo sapiens
tggagtggtggagctgcagctggtccgaggcgggagttcggggagaggcggggtttttcgtacctagccaccctgtatgtgtgtccgcactcacaccctccatacgcgtgccgcctcacttccctttccctctcgcaccccggctttgcgatcgggggtcggggggacgcggggacccggccagggctgaggagggaggcgcggggctgcagagatggcgtggaagtc

SEQ ID NO: 986 - DNA, 153 bp, Homo sapiens
atctccctgaacgaacatcgcggtctccccgaacgtcgcggtccctccgaacgtcgcggtctccccgaacatcgcggtgcccccgaacatcgctgtctccccgaacatcgcgatctccccgaacatcgtgatctccccagacatgcccagctg

SEQ ID NO: 987 - DNA, 163 bp, Homo sapiens
ccactcaacagcgtgtctccgagcccgctgatgctactgcacccgccgccgcagctgtcgcctttcctgcagccccacggccagcaggtgccctactacctggagaacgagcccagcggctacacggtgcgcgaggccggcccgccggcattctacaggtacc

SEQ ID NO: 988 - DNA, 191 bp, Homo sapiens
gcgcagagtcccgcagaggcggacgccgcggcacgcgcctcgaaaagcctcaaactcttatcctcggctctcccgccccacctccgccccgcagccaagacccgcgccgtggcgggcccgacggccaaggaaagcccaccagccctccgcaccgtgggcgacgggccaagacccggccctaaacggccaga

SEQ ID NO: 989 - DNA, 146 bp, Homo sapiens
gggcgcacaaaggaggtgccgggccgggcttgcggcgggcgggcgggccggggtggacccgccggtgccggacgccccctgcccggccgggaccccgcgccgctggcgtccaagttggcgcgttgcggagggctgcggggtgagcc

SEQ ID NO: 990 - DNA, 160 bp, Homo sapiens
gactgtaggaagtgtgtcagggaagccaacggaaccgctggcccgccggtggtgcgcccggcattaggaaagtctctacgatcgctgaggtatcgggcagtcagtgcccgttgccaacgcggagggaacgggcggagactgcgggcaacacgtggcagag

SEQ ID NO: 991 - DNA, 160 bp, Homo sapiens
ctgctgctggatcttcacactgcagccagcagcccaggacgcccccggccggacgatgggtacccgcgcctgagcatcccccgggcaggcgccaggcgcgaaggcagggggcgggaggaaaggggcgggggaattcctgattccctggtggaccctggaa

SEQ ID NO: 992 - DNA, 180 bp, Homo sapiens
gtgaccaagagacccagtacttcgggccaggcacgcggctcctggtgctcggtgagcgcgggctgctggggcgcgggcgcgggcggcttgggtctggtttttgcggggagtccccgggctgtgctctggggccaacgtcctgactttcggggccggcagcaggctgaccgtgctgggtga

SEQ ID NO: 993 - DNA, 153 bp, Homo sapiens
ggtcctcccatgctctgagccctaaggactctgcccgaggggctctcggggacttgggggcggtcccccaatggagggtgcgacagggaaagccccgagtccgccctccctgggaaatcacgcgcacacccaggattctactttggtctggcc

SEQ ID NO: 994 - DNA, 222 bp, Homo sapiens
cgcctccggggctccctggggaagagccggttccccgcgccgcacgctgggagcttgatttgcccctttcagaccatgtgggcctttcatttgcatatttccgaattatagatgaaaacgtatccaggatcaagtgaattgttttcctttgagtcctcttgggacagaaaaggaagtaggtccccgctccagccccgcccgtcccccatccccggcgctccc

SEQ ID NO: 995 - DNA, 156 bp, Homo sapiens
gctgaggcggcttagagggtcattaatcaaaccctccggcggggcgggctcgggggcggggcgtcctcctggccccgcccctcggctcactgcctcacgctgctttccccgaggcgcctcgctgagggcggcgtgtggagagtttggggtgtctgc

SEQ ID NO: 996 - DNA, 141 bp, Homo sapiens
ggcgcccccaagagacagcttggagcaggcgcctctgctgcaggctgcgtgctgcctcggggcggtggtaccctccctcctcggccccaaccgccaggcctgccgtttgcgcccctcaggggccagcccggagccagagaa

SEQ ID NO: 997 - DNA, 165 bp, Homo sapiens
tcctgctcaccttgggcttggtggcctgcgtgtcggcggagtcggtgagtgggccaggcggaggatgcgcgcgccgtttagggtgtttgaagctacgagaggagcccgcagggaataggggagcgccacctggggaacccccagtccccaagtatacaccggaga

SEQ ID NO: 998 - DNA, 141 bp, Homo sapiens
ccgagtccggctttgagtacccagcaaggtcaagcaggcgaaggagggggcgggggttcctgggcgcgcccccgtccgcgcacagtcggggccttggaagggggtgtgcgcagcccgccgagtcagtcccgctcgcctgcc

SEQ ID NO: 999 - DNA, 193 bp, Homo sapiens
tcctggggcccttgcgtcccgggggcgtggcaggctcggccctggtccaggtgcgagtgcgggagctgcgcaagggcgaagcggagcggggcggcgcgggcggtggcgggaagctcttttcactctgcgcctgggatgggcgcgcgtggcaccaccacggcgccgccggcggcttcctgctgcgcgttcgccc

SEQ ID NO: 1000 - DNA, 210 bp, Homo sapiens
ccgtggccaccacctcgcttcattcccgtctctttgggccgccgcattcgtccacgtgcccgtctctccctgcgcaaaattccaagatgagcaaatactgggctcacggtggagcgccgcgggggcccccctgagccggggcgggtcgggggcgggaccagggtccggccggggcgtgcccgaggggagggactccccggcttgcgaccc

SEQ ID NO: 1001 - DNA, 192 bp, Homo sapiens
caaagtcccaccacacttctgggccgggcggcaggagtggggacgggagtggaggtcttgcggagcagcggctcggggagctgtgggctgcgggctgggcggggcggcgcgatgcggggcgggcggctcagccccgctccccctaccggcgccctcaggggatgaatgtccctcctgacggtctctttactt

SEQ ID NO: 1002 - DNA, 186 bp, Homo sapiens
gctccccaacctggtctgctgaacgcaaaccgctgagagtttgctgcaccgccccctggggcccctggctgccgagtcccgctaaggcaaagacgccagcaagcgaggaagcgcagcggaagaaaaacaagcgggcgcgcgaggggagccccaggagggctgccgagtggctggcaggcggctccc

SEQ ID NO: 1003 - DNA, 155 bp, Homo sapiens
gggaagtgcgggtggctgcccgggccctcagaggccgcaccacctattgtgttccaggctcgcaggaagccagaccttgcgagaggtgtgtgggggcggagagtggcacaggtttgacactgcaggtcggaggaggaagacagtggctgcaaagg

SEQ ID NO: 1004 - DNA, 255 bp, Homo sapiens
gtgtgtatgtgtgagggtgtgacggaggcgcccacgtgctcggcccgcccgtgttacggccgcctaccggctgcagaggagaagggtaggctgtgggcggcggcggggcgcggaggggtagccaggagcgcaggctgggctccgcacctccctgccccaaaacccattgatgcagcggccactgcggctgccgagcggcgtcttcccagagcccggggctgtgcccgcccgatgcaggatgcaactgaggaagcc

SEQ ID NO: 1005 - DNA, 220 bp, Homo sapiens
ctttctgggcgcccccagcgaatgcgagcggcgaggcgagggcgagcgcgccgaggaagggcgggagaggcgcggagcttggccgcgccgcgctgcgccgagcgccgggctctccccgcgagctccccgggcccgcgcgcgcgccccccactgcccccgccccccgcgcggcgcgtgccccccaccccccgccgcgcgccctcgcacccgcccggctcca

SEQ ID NO: 1006 - DNA, 200 bp, Homo sapiens
gagacgaagagaggcggtgagaacgcgggtgcttagggaccccacccccggctcccgctgggggcccgcgagcggctcggggacgtctgggctggggaagcggggctgttacccccagggcgggaggcagagacgatccagctcctggcttcgccccctccgcgacgcgacccccgaggggccctgggccgcgcctgcag

SEQ ID NO: 1007 - DNA, 185 bp, Homo sapiens
cctggacaaagctcttaagatgtccctgccgcggaggtcgaggatccgctcgtccgtgggtgagctgggaggggcgcggcgagggagggtgggcccggggcgggggcggcgcggggcgcgcctgcggttatgcgacactgccccgcccgcgccccgctcccctccctgggctccctgggctctct

SEQ ID NO: 1008 - DNA, 198 bp, Homo sapiens
agtcgtaggtggagacaccccagctgtgcttccggggaccccgcttggccgctgcgccctgcgccccgcagccgccagagccgccccaccccgcgacgcctgggctgggcgctttaaagccgccacggcccccgccccctccaggccagcaaggcgcgcgctccctccgccagccgctatggtggcctgggaaaggcc

SEQ ID NO: 1009 - DNA, 216 bp, Homo sapiens
agctcaaccaaggaccgctcagaggggctctcaccctgaacctcggcttttctaaaggaagggcagaccccagatttcccccttctcttctcgaacgtgctttgggtgtttttctgctttcttttttggcaagtcaggacagcgcacagtgcacggagctccgaagctctctcagctactcccggatttctggttaaacctgagggtgagcccgaa

SEQ ID NO: 1010 - DNA, 194 bp, Homo sapiens
gcggagtctcggggaagagtcttaaaggcgcgcgctcctccgtgccccgcgcactcgaacgggagccgcggagagctcgcctcccgctgccgccggcgcctcggggaggtaagtgccacccgcggatcccgagtcgcggccgggtgggggcggcccgcggctgccccgcgctcgggaagctctggctggggctg

SEQ ID NO: 1011 - DNA, 214 bp, Homo sapiens
ctcgggggcccctcctctgctacgccgctggggctcgcccgccacccacagccctcgcagagccctccgggcacaccgcggctggccgcccggggccaaggatggggcgggagcgcccacccacccccgcgccggccggggcatccaagaggcgcgctcgcagccacacggcgccccgcctcccgctccgaaaaagctcctgctcccctggcgc

SEQ ID NO: 1012 - DNA, 201 bp, Homo sapiens
ctggccccgcttgcccaccacggcgcgcccaaacccacgcggcccgcggccccttgcgtgctctgccgaccccgggccgcaggaggggttagcctcgccggtccccacgcggggtctgcgccggcagcgccacgggctggaacgcgcctcgggagaaattacccgcgcggggtcgcggcgtcttctgccccaactcccgta

SEQ ID NO: 1013 - DNA, 108 bp, Homo sapiens
gcccgggaggcgggaagtgggcagcagcgcccccgcctggcccctgtgcgccccgacccgacgcctccccgcccgaccaggtgcctcgagagcgcacagctgggaggg

SEQ ID NO: 1014 - DNA, 191 bp, Homo sapiens
ggactgggacctgcctctggggaatccgcctagaagacggcggcggactggggtcgggcactctccagggctgtcaggccctccccagccctgcacctgccgcgccgccccacctcgccaggaagtctcagagaccccggggatggggtgggagcgccttcccatcgcgggctcaaaaagaaggaaggacg

SEQ ID NO: 1015 - DNA, 212 bp, Homo sapiens
ggatgaggctggccaggtgttcgcgctcgggcgccgacaggtaccgctgctgccgaaagcgccgctccagctcgtaggtctgcgccttggagaaaagcactcgccgctttcgcttcttgccggcgtcccccccgccgcccggggtctccttgtcattgtccggtgactcgtcggccgagggctccggggacttggagcttgagtcctgaggg

SEQ ID NO: 1016 - DNA, 165 bp, Homo sapiens
cgcacttgccgggtcaccttgtcccggaggtaagtccagacctcccggccgcgggggcgggcggaggggcccgcagtgggcggggtcgcggcaggggccgcgagctggcggcgggagctggaggctgccctgcgctggcgggtgtcctagtcctggctccgcctc

SEQ ID NO: 1017 - DNA, 241 bp, Homo sapiens
agcctggagagaagttactccgggacctcccaccctctcgtctctctctccggctctgctcgagtctaggaggcggcgctggcgtgcgctactctcgccttagccaaggtcccctgcccgcccgcgcacccgcccgtcgcccgcggcccgcgcgcccttcctccctctcgctcaagtcaaacaggtcaaggctggggccgcggcagggacagggtccggggtagtctgggactagggacgt

SEQ ID NO: 1018 - DNA, 206 bp, Homo sapiens
tccagcgtgtttgggaggcaaactcgttgactagctcttgagaggagtggctagaggaatccaggcggggaaggggacggtggactccaggagagtgtaatttacaaaggcggggggcggggacgcccaggtccgagtcccaggactctgcgccggacgcttcgcccgccctttcaggtcccctgcccggtcctcgtacccgcgcg

SEQ ID NO: 1019 - DNA, 167 bp, Homo sapiens
ctgcccaatttccagggttcttcatgccccctctgcgccccgacgtgcgagaacactgcccttggcagtgcagggcgcccccacttattactcccctcggctgggcccggccagcagggagggccgccctgtgcgcgcgctccctcttcacttcccagggcggcgca

SEQ ID NO: 1020 - DNA, 155 bp, Homo sapiens
ccccatgtcgctgcccagcttgcgccttccgaacccctcgggcacagctcgctgcattggagccccaggagacaccgctcgtagcagcgcacggagcgagggacctttagttcgggtcgggagagcaaagcctcgttggcctgctctggattgtt

SEQ ID NO: 1021 - DNA, 160 bp, Homo sapiens
ccttggtttcttccctttagatccggacactgaagcaggcggtagcgggtgtcttcctacctggctaccccttcggcgcctagcgcgaggcagggtgggcgaggcgagggcggcgccctgcgagggagggcggtcgcagaacctgcgggccttcagcgcc

SEQ ID NO: 1022 - DNA, 190 bp, Homo sapiens
gggccggagccgcttgagccggcgggagcgggcacccctgcgcgccgcgctcggcctcgcctccgcgccccccgcgcgcccgccgcggtccctcccccgcgcccgtccgctcgccgggcccccgccgccgccccggggtgcagccgagcggccgcgccgggtccccgggacggggtggaagtgggggtgg

SEQ ID NO: 1023 - DNA, 142 bp, Homo sapiens
gagagagctgctagggcggtttctccgcctcgggcctgttgggcggggccggctaaggtgcgcgtgctcgctggtcctaacggttctgttgggcgtttctgctgagaggcgggaggggctgagagtctgtgcgaaggtaggt

SEQ ID NO: 1024 - DNA, 179 bp, Homo sapiens
gatgcgctgctgctgggaactggccggcgggagcgcggtctcagccctcgccagcagccacgcgcgtctgggggcggcgcgctgcgagcggctgagaccgcgggcgggggcgggcgcctggcttgggcagcgtcctcagcgcggtgtgggcggcgagccccgcagggctgcaatcgttc

SEQ ID NO: 1025 - DNA, 178 bp, Homo sapiens
agtcagagggtctgcggtggccgagggagggaccctacgacggggagcccgcccggtgccgctcttcttcccctccccgcccctccgctccccccaccccgtcccttccgccgattccgggagcgacgggcgcccgtgacctgcgaacgctgccaagtgacggtccccgagtctgaag

SEQ ID NO: 1026 - DNA, 123 bp, Homo sapiens
ctggagtaaggacggcaaggagctacgtgacggtcccaagtaccgctacgtcttcgaggaccctgacgtggtggcactggtggtgcgcgacggcgagctggcagacctgggccagtacagcat

SEQ ID NO: 1027 - DNA, 193 bp, Homo sapiens
gctgggagtggggacactggatcggaggggacccttcacgggagtactcgctgccctcactcgtctcggaacgcggctggacccggagtccccgaccgcagcccgcgcacgacccccgggagcctgtctccgcggccgccgacccacgtccgcgctgccgccccactgccaggtggcccgagagatgcaggag

SEQ ID NO: 1028 - DNA, 188 bp, Homo sapiens
gaatggtaggctccatttaaagagtgcctggtggcgcgcggtgtccttcttggagcagctctcggcgcccgcccgccggggtctcggcgatcgctgctcctcctcctccttctcctcctcttttttctcctccgcctcctccccccgccgcctcgccaccgccgcggctagggctggaggcgccgctg

SEQ ID NO: 1029 - DNA, 206 bp, Homo sapiens
tgcccagagctcggacccagcagcccggccccgcgccctccctgtcccgcggcccgcaggcccagccctcaagcgcccagcctccgcggcctttgtggcgtcacagccagcctgaagaatggttgccttggagacgtaaacccaagagccctgctcctggagctgagaactgcagcgcggaggcttcggagcgagccggggcagtc

SEQ ID NO: 1030 - DNA, 168 bp, Homo sapiens
ggacttgttggatactctggagaatggccgtggggaggcgctaggaggcggcgggggctccctgggcccgggggccgggccgccgcctctgctgctgggcagcgcctccgacatgaaggctgagctgtcgcaacttattagcgacctgggcgagctcagcttcggcaa

SEQ ID NO: 1031 - DNA, 242 bp, Homo sapiens
cgcccactgcgtgctgccttcgtccgtcccctcctcccccgctccttcccctccttcccctgctcccgcgccgcctcgcgtctcccgcccgctgtagccggcgaggagcgccgcacgttggccccggcgcgaggagctcccgggttcccgggcgggcactggagtaaggagctgcgagcgcagcccgaggcggggcacggcggaaggcgcggcgagagcggggtccctgcgagcgcagtcgg

SEQ ID NO: 1032 - DNA, 183 bp, Homo sapiens
ttaccatccactacgaccaggtctccatcgactgtcagggcggcgacttcctgaaggtgaggcgcccacggccagccaacctagccggagggcggcacgggagggttggaaagggctggggcgctgcacccagcgtggggctgctgagcgtaggtagccagtggcacttcttagacacttcgc

SEQ ID NO: 1033 - DNA, 197 bp, Homo sapiens
ggctcagaggtctctggctggcgggcgccccgtcggccgccggcttcctccttgaaacccgccggcgcacatgaggccgctgcccccgccgcaggcgctggcggccccctcgcggtgcccgtggtgatgccatgccccgccaccacgcgggaggagaggagggcggcgccgccgggctctgggtgaagagcggcgca

SEQ ID NO: 1034 - DNA, 181 bp, Homo sapiens
ggactcggtgaatctcccctgcagcgaaagcaacccagatggacgcgggaactgacgcaccggcacagaggatcagcgcgccctcaagccgactcccgggccggcccctcgctgccctcccgcaacctcctccctcccaggacctccccgtcggagccctggctcaccgtgaccttggggc

SEQ ID NO: 1035 - DNA, 228 bp, Homo sapiens
gacttccacgccatctctgcagccccgcgcctccctcctcagccctggccgggtccccgcgtccccccgacccccgatcgcaaagccggggtgcgagagggaaagggaagtgaggcggcacgcgtatggagggtgtgagtgcggacacacatacagggtggctaggtacgaaaaaccccgcctctccccgaactcccgcctcggaccagctgcagctccaccactcca

SEQ ID NO: 1036 - DNA, 153 bp, Homo sapiens
cagctgggcatgtctggggagatcacgatgttcggggagatcgcgatgttcggggagacagcgatgttcgggggcaccgcgatgttcggggagaccgcgacgttcggagggaccgcgacgttcggggagaccgcgatgttcgttcagggagat

SEQ ID NO: 1037 - DNA, 163 bp, Homo sapiens
ggtacctgtagaatgccggcgggccggcctcgcgcaccgtgtagccgctgggctcgttctccaggtagtagggcacctgctggccgtggggctgcaggaaaggcgacagctgcggcggcgggtgcagtagcatcagcgggctcggagacacgctgttgagtgg

SEQ ID NO: 1038 - DNA, 191 bp, Homo sapiens
tctggccgtttagggccgggtcttggcccgtcgcccacggtgcggagggctggtgggctttccttggccgtcgggcccgccacggcgcgggtcttggctgcggggcggaggtggggcgggagagccgaggataagagtttgaggcttttcgaggcgcgtgccgcggcgtccgcctctgcgggactctgcgc

SEQ ID NO: 1039 - DNA, 146 bp, Homo sapiens
ggctcaccccgcagccctccgcaacgcgccaacttggacgccagcggcgcggggtcccggccgggcagggggcgtccggcaccggcgggtccaccccggcccgcccgcccgccgcaagcccggcccggcacctcctttgtgcgccc

SEQ ID NO: 1040 - DNA, 160 bp, Homo sapiens
ctctgccacgtgttgcccgcagtctccgcccgttccctccgcgttggcaacgggcactgactgcccgatacctcagcgatcgtagagactttcctaatgccgggcgcaccaccggcgggccagcggttccgttggcttccctgacacacttcctacagtc

SEQ ID NO: 1041 - DNA, 160 bp, Homo sapiens
ttccagggtccaccagggaatcaggaattcccccgcccctttcctcccgccccctgccttcgcgcctggcgcctgcccgggggatgctcaggcgcgggtacccatcgtccggccgggggcgtcctgggctgctggctgcagtgtgaagatccagcagcag

SEQ ID NO: 1042 - DNA, 180 bp, Homo sapiens
tcacccagcacggtcagcctgctgccggccccgaaagtcaggacgttggccccagagcacagcccggggactccccgcaaaaaccagacccaagccgcccgcgcccgcgccccagcagcccgcgctcaccgagcaccaggagccgcgtgcctggcccgaagtactgggtctcttggtcac

SEQ ID NO: 1043 - DNA, 153 bp, Homo sapiens
ggccagaccaaagtagaatcctgggtgtgcgcgtgatttcccagggagggcggactcggggctttccctgtcgcaccctccattgggggaccgcccccaagtccccgagagcccctcgggcagagtccttagggctcagagcatgggaggacc

SEQ ID NO: 1044 - DNA, 222 bp, Homo sapiens
gggagcgccggggatgggggacgggcggggctggagcggggacctacttccttttctgtcccaagaggactcaaaggaaaacaattcacttgatcctggatacgttttcatctataattcggaaatatgcaaatgaaaggcccacatggtctgaaaggggcaaatcaagctcccagcgtgcggcgcggggaaccggctcttccccagggagccccggaggcg

SEQ ID NO: 1045 - DNA, 156 bp, Homo sapiens
gcagacaccccaaactctccacacgccgccctcagcgaggcgcctcggggaaagcagcgtgaggcagtgagccgaggggcggggccaggaggacgccccgcccccgagcccgccccgccggagggtttgattaatgaccctctaagccgcctcagc

SEQ ID NO: 1046 - DNA, 141 bp, Homo sapiens
ttctctggctccgggctggcccctgaggggcgcaaacggcaggcctggcggttggggccgaggagggagggtaccaccgccccgaggcagcacgcagcctgcagcagaggcgcctgctccaagctgtctcttgggggcgcc

SEQ ID NO: 1047 - DNA, 167 bp, Homo sapiens
gatctccggtgtatacttggggactgggggttccccaggtggcgctcccctattccctgcgggctcctctcgtagcttcaaacaccctaaacggcgcgcgcatcctccgcctggcccactcaccgactccgccgacacgcaggccaccaagcccaaggtgagcagga

SEQ ID NO: 1048 - DNA, 141 bp, Homo sapiens
ggcaggcgagcgggactgactcggcgggctgcgcacacccccttccaaggccccgactgtgcgcggacgggggcgcgcccaggaacccccgccccctccttcgcctgcttgaccttgctgggtactcaaagccggactcgg

SEQ ID NO: 1049 - DNA, 193 bp, Homo sapiens
gggcgaacgcgcagcaggaagccgccggcggcgccgtggtggtgccacgcgcgcccatcccaggcgcagagtgaaaagagcttcccgccaccgcccgcgccgccccgctccgcttcgcccttgcgcagctcccgcactcgcacctggaccagggccgagcctgccacgcccccgggacgcaagggccccagga

SEQ ID NO: 1050 - DNA, 210 bp, Homo sapiens
gggtcgcaagccggggagtccctcccctcgggcacgccccggccggaccctggtcccgcccccgacccgccccggctcaggggggcccccgcggcgctccaccgtgagcccagtatttgctcatcttggaattttgcgcagggagagacgggcacgtggacgaatgcggcggcccaaagagacgggaatgaagcgaggtggtggccacgg

SEQ ID NO: 1051 - DNA, 192 bp, Homo sapiens
aagtaaagagaccgtcaggagggacattcatcccctgagggcgccggtagggggagcggggctgagccgcccgccccgcatcgcgccgccccgcccagcccgcagcccacagctccccgagccgctgctccgcaagacctccactcccgtccccactcctgccgcccggcccagaagtgtggtgggactttg

SEQ ID NO: 1052 - DNA, 186 bp, Homo sapiens
gggagccgcctgccagccactcggcagccctcctggggctcccctcgcgcgcccgcttgtttttcttccgctgcgcttcctcgcttgctggcgtctttgccttagcgggactcggcagccaggggccccagggggcggtgcagcaaactctcagcggtttgcgttcagcagaccaggttggggagc

SEQ ID NO: 1053 - DNA, 155 bp, Homo sapiens
cctttgcagccactgtcttcctcctccgacctgcagtgtcaaacctgtgccactctccgcccccacacacctctcgcaaggtctggcttcctgcgagcctggaacacaataggtggtgcggcctctgagggcccgggcagccacccgcacttccc

SEQ ID NO: 1054 - DNA, 255 bp, Homo sapiens
ggcttcctcagttgcatcctgcatcgggcgggcacagccccgggctctgggaagacgccgctcggcagccgcagtggccgctgcatcaatgggttttggggcagggaggtgcggagcccagcctgcgctcctggctacccctccgcgccccgccgccgcccacagcctacccttctcctctgcagccggtaggcggccgtaacacgggcgggccgagcacgtgggcgcctccgtcacaccctcacacatacacac

SEQ ID NO: 1055 - DNA, 220 bp, Homo sapiens
tggagccgggcgggtgcgagggcgcgcggcggggggtggggggcacgcgccgcgcggggggcgggggcagtggggggcgcgcgcgcgggcccggggagctcgcggggagagcccggcgctcggcgcagcgcggcgcggccaagctccgcgcctctcccgcccttcctcggcgcgctcgccctcgcctcgccgctcgcattcgctgggggcgcccagaaag

SEQ ID NO: 1056 - DNA, 200 bp, Homo sapiens
ctgcaggcgcggcccagggcccctcgggggtcgcgtcgcggagggggcgaagccaggagctggatcgtctctgcctcccgccctgggggtaacagccccgcttccccagcccagacgtccccgagccgctcgcgggcccccagcgggagccgggggtggggtccctaagcacccgcgttctcaccgcctctcttcgtctc

SEQ ID NO: 1057 - DNA, 185 bp, Homo sapiens
agagagcccagggagcccagggaggggagcggggcgcgggcggggcagtgtcgcataaccgcaggcgcgccccgcgccgcccccgccccgggcccaccctccctcgccgcgcccctcccagctcacccacggacgagcggatcctcgacctccgcggcagggacatcttaagagctttgtccagg

SEQ ID NO: 1058 - DNA, 198 bp, Homo sapiens
ggcctttcccaggccaccatagcggctggcggagggagcgcgcgccttgctggcctggagggggcgggggccgtggcggctttaaagcgcccagcccaggcgtcgcggggtggggcggctctggcggctgcggggcgcagggcgcagcggccaagcggggtccccggaagcacagctggggtgtctccacctacgact

SEQ ID NO: 1059 - DNA, 216 bp, Homo sapiens
ttcgggctcaccctcaggtttaaccagaaatccgggagtagctgagagagcttcggagctccgtgcactgtgcgctgtcctgacttgccaaaaaagaaagcagaaaaacacccaaagcacgttcgagaagagaagggggaaatctggggtctgcccttcctttagaaaagccgaggttcagggtgagagcccctctgagcggtccttggttgagct

SEQ ID NO: 1060 - DNA, 194 bp, Homo sapiens
cagccccagccagagcttcccgagcgcggggcagccgcgggccgcccccacccggccgcgactcgggatccgcgggtggcacttacctccccgaggcgccggcggcagcgggaggcgagctctccgcggctcccgttcgagtgcgcggggcacggaggagcgcgcgcctttaagactcttccccgagactccgc

SEQ ID NO: 1061 - DNA, 214 bp, Homo sapiens
gcgccaggggagcaggagctttttcggagcgggaggcggggcgccgtgtggctgcgagcgcgcctcttggatgccccggccggcgcgggggtgggtgggcgctcccgccccatccttggccccgggcggccagccgcggtgtgcccggagggctctgcgagggctgtgggtggcgggcgagccccagcggcgtagcagaggaggggcccccgag

SEQ ID NO: 1062 - DNA, 201 bp, Homo sapiens
tacgggagttggggcagaagacgccgcgaccccgcgcgggtaatttctcccgaggcgcgttccagcccgtggcgctgccggcgcagaccccgcgtggggaccggcgaggctaacccctcctgcggcccggggtcggcagagcacgcaaggggccgcgggccgcgtgggtttgggcgcgccgtggtgggcaagcggggccag

SEQ ID NO: 1063 - DNA, 108 bp, Homo sapiens
ccctcccagctgtgcgctctcgaggcacctggtcgggcggggaggcgtcgggtcggggcgcacaggggccaggcgggggcgctgctgcccacttcccgcctcccgggc

SEQ ID NO: 1064 - DNA, 191 bp, Homo sapiens
cgtccttccttctttttgagcccgcgatgggaaggcgctcccaccccatccccggggtctctgagacttcctggcgaggtggggcggcgcggcaggtgcagggctggggagggcctgacagccctggagagtgcccgaccccagtccgccgccgtcttctaggcggattccccagaggcaggtcccagtcc

SEQ ID NO: 1065 - DNA, 212 bp, Homo sapiens
ccctcaggactcaagctccaagtccccggagccctcggccgacgagtcaccggacaatgacaaggagaccccgggcggcgggggggacgccggcaagaagcgaaagcggcgagtgcttttctccaaggcgcagacctacgagctggagcggcgctttcggcagcagcggtacctgtcggcgcccgagcgcgaacacctggccagcctcatcc

SEQ ID NO: 1066 - DNA, 165 bp, Homo sapiens
gaggcggagccaggactaggacacccgccagcgcagggcagcctccagctcccgccgccagctcgcggcccctgccgcgaccccgcccactgcgggcccctccgcccgcccccgcggccgggaggtctggacttacctccgggacaaggtgacccggcaagtgcg

SEQ ID NO: 1067 - DNA, 241 bp, Homo sapiens
acgtccctagtcccagactaccccggaccctgtccctgccgcggccccagccttgacctgtttgacttgagcgagagggaggaagggcgcgcgggccgcgggcgacgggcgggtgcgcgggcgggcaggggaccttggctaaggcgagagtagcgcacgccagcgccgcctcctagactcgagcagagccggagagagagacgagagggtgggaggtcccggagtaacttctctccaggct

SEQ ID NO: 1068 - DNA, 206 bp, Homo sapiens
cgcgcgggtacgaggaccgggcaggggacctgaaagggcgggcgaagcgtccggcgcagagtcctgggactcggacctgggcgtccccgccccccgcctttgtaaattacactctcctggagtccaccgtccccttccccgcctggattcctctagccactcctctcaagagctagtcaacgagtttgcctcccaaacacgctgga

SEQ ID NO: 1069 - DNA, 167 bp, Homo sapiens
tgcgccgccctgggaagtgaagagggagcgcgcgcacagggcggccctccctgctggccgggcccagccgaggggagtaataagtgggggcgccctgcactgccaagggcagtgttctcgcacgtcggggcgcagagggggcatgaagaaccctggaaattgggcag

SEQ ID NO: 1070 - DNA, 155 bp, Homo sapiens
aacaatccagagcaggccaacgaggctttgctctcccgacccgaactaaaggtccctcgctccgtgcgctgctacgagcggtgtctcctggggctccaatgcagcgagctgtgcccgaggggttcggaaggcgcaagctgggcagcgacatgggg

SEQ ID NO: 1071 - DNA, 160 bp, Homo sapiens
ggcgctgaaggcccgcaggttctgcgaccgccctccctcgcagggcgccgccctcgcctcgcccaccctgcctcgcgctaggcgccgaaggggtagccaggtaggaagacacccgctaccgcctgcttcagtgtccggatctaaagggaagaaaccaagg

SEQ ID NO: 1072 - DNA, 190 bp, Homo sapiens
ccacccccacttccaccccgtcccggggacccggcgcggccgctcggctgcaccccggggcggcggcgggggcccggcgagcggacgggcgcgggggagggaccgcggcgggcgcgcggggggcgcggaggcgaggccgagcgcggcgcgcaggggtgcccgctcccgccggctcaagcggctccggccc

SEQ ID NO: 1073 - DNA, 142 bp, Homo sapiens
acctaccttcgcacagactctcagcccctcccgcctctcagcagaaacgcccaacagaaccgttaggaccagcgagcacgcgcaccttagccggccccgcccaacaggcccgaggcggagaaaccgccctagcagctctctc

SEQ ID NO: 1074 - DNA, 179 bp, Homo sapiens
gaacgattgcagccctgcggggctcgccgcccacaccgcgctgaggacgctgcccaagccaggcgcccgcccccgcccgcggtctcagccgctcgcagcgcgccgcccccagacgcgcgtggctgctggcgagggctgagaccgcgctcccgccggccagttcccagcagcagcgcatc

SEQ ID NO: 1075 - DNA, 178 bp, Homo sapiens; identical to SEQ ID NO: 1025

SEQ ID NO: 1076 - DNA, 123 bp, Homo sapiens
atgctgtactggcccaggtctgccagctcgccgtcgcgcaccaccagtgccaccacgtcagggtcctcgaagacgtagcggtacttgggaccgtcacgtagctccttgccgtccttactccag

SEQ ID NO: 1077 - DNA, 193 bp, Homo sapiens
ctcctgcatctctcgggccacctggcagtggggcggcagcgcggacgtgggtcggcggccgcggagacaggctcccgggggtcgtgcgcgggctgcggtcggggactccgggtccagccgcgttccgagacgagtgagggcagcgagtactcccgtgaagggtcccctccgatccagtgtccccactcccagc

SEQ ID NO: 1078 - DNA, 188 bp, Homo sapiens
cagcggcgcctccagccctagccgcggcggtggcgaggcggcggggggaggaggcggaggagaaaaaagaggaggagaaggaggaggaggagcagcgatcgccgagaccccggcgggcgggcgccgagagctgctccaagaaggacaccgcgcgccaccaggcactctttaaatggagcctaccattc

SEQ ID NO: 1079 - DNA, 206 bp, Homo sapiens
gactgccccggctcgctccgaagcctccgcgctgcagttctcagctccaggagcagggctcttgggtttacgtctccaaggcaaccattcttcaggctggctgtgacgccacaaaggccgcggaggctgggcgcttgagggctgggcctgcgggccgcgggacagggagggcgcggggccgggctgctgggtccgagctctgggca

SEQ ID NO: 1080 - DNA, 168 bp, Homo sapiens
ttgccgaagctgagctcgcccaggtcgctaataagttgcgacagctcagccttcatgtcggaggcgctgcccagcagcagaggcggcggcccggcccccgggcccagggagcccccgccgcctcctagcgcctccccacggccattctccagagtatccaacaagtcc

SEQ ID NO: 1081 - DNA, 242 bp, Homo sapiens
ccgactgcgctcgcagggaccccgctctcgccgcgccttccgccgtgccccgcctcgggctgcgctcgcagctccttactccagtgcccgcccgggaacccgggagctcctcgcgccggggccaacgtgcggcgctcctcgccggctacagcgggcgggagacgcgaggcggcgcgggagcaggggaaggaggggaaggagcgggggaggaggggacggacgaaggcagcacgcagtgggcg

SEQ ID NO: 1082 - DNA, 183 bp, Homo sapiens
gcgaagtgtctaagaagtgccactggctacctacgctcagcagccccacgctgggtgcagcgccccagccctttccaaccctcccgtgccgccctccggctaggttggctggccgtgggcgcctcaccttcaggaagtcgccgccctgacagtcgatggagacctggtcgtagtggatggtaa

SEQ ID NO: 1083 - DNA, 197 bp, Homo sapiens
tgcgccgctcttcacccagagcccggcggcgccgccctcctctcctcccgcgtggtggcggggcatggcatcaccacgggcaccgcgagggggccgccagcgcctgcggcgggggcagcggcctcatgtgcgccggcgggtttcaaggaggaagccggcggccgacggggcgcccgccagccagagacctctgagcc

SEQ ID NO: 1084 - DNA, 181 bp, Homo sapiens
gccccaaggtcacggtgagccagggctccgacggggaggtcctgggagggaggaggttgcgggagggcagcgaggggccggcccgggagtcggcttgagggcgcgctgatcctctgtgccggtgcgtcagttcccgcgtccatctgggttgctttcgctgcaggggagattcaccgagtcc

SEQ ID NO: 1085 - DNA, 196 bp, Homo sapiens
ctaactgccctcctcaagcacaggtcgccgcgtccccaactccctgtcctcaccccggcccgcccgtctcctcctccgccctctcccgactgcagcgggggcagcgctttggcgctcccaaggactccccgccactctccccacaaagcagcggcggtggcggcggctgctgctggatcttcacactgcagccagc

SEQ ID NO: 1086 - DNA, 138 bp, Homo sapiens
ggccgctgtgccgctactcacccgagccgctcgggctggccgcgagccgggatccgcgagggctggcgggctctggcccccgaggacgcagacatgtggcttgaacctccgctcccctagccgttgcctctgtgcatc

SEQ ID NO: 1087 - DNA, 176 bp, Homo sapiens
gtccccgccagctagcagcccggcgaggcgctggcccacccatggtcctcgggcggcggcccctgcgcccagccctgcgcgtagcctccgtctctcgcccggggccgccgagcccccgacacgggcgagatgctgaacggcgcaggcctggacaaagctcttaagatgtccctgcc

SEQ ID NO: 1088 - DNA, 171 bp, Homo sapiens
ggaagctctggctggggctgcggtcggagggcggcgcccaagttttcttgaaggcctcggagggcagctggagcggcgtagagcctgcgcggggatggcgggggtggccgcgggccggggccgtctgggggcggccatcccgggcggtgcgtggaaaagtaggcactggtg

SEQ ID NO: 1089 - DNA, 164 bp, Homo sapiens
catctcagcttttaagcctccctgagccggggctgcgttctcgttgtctccttcggccgccgcttcctggcgccagagggaccccgcggcccgcacgggcctgtcctcggctccgctcggagggtgtgcgggttcccgctccgctggccccgcttgcccaccac

SEQ ID NO: 1090 - DNA, 171 bp, Homo sapiens
ggccgcggaggacacaacaggtagagccgggggtgcccggccgcgcgccccccgcgcatcatgcagctctttgtcacctctctcgcccccaggccaaaatcctgagcatgatggaagacaataagcagctcgcgctccgcatcgatggggcggtccagtcggccagccagg

SEQ ID NO: 1091 - DNA, 135 bp, Homo sapiens
gcctgctgtcaggcgacagcacgggcagcgagagctccatcgagggcgggggccctgacgccacctccgccaccgccggggactcgtcccgccaggccgacggcgccagtgcagacgagccccactcgggctgag

SEQ ID NO: 1092 - DNA, 196 bp, Homo sapiens
gctggctgcagtgtgaagatccagcagcagccgccgccaccgccgctgctttgtggggagagtggcggggagtccttgggagcgccaaagcgctgcccccgctgcagtcgggagagggcggaggaggagacgggcgggccggggtgaggacagggagttggggacgcggcgacctgtgcttgaggagggcagttag

SEQ ID NO: 1093 - DNA, 138 bp, Artificial Sequence
  Description of Artificial Sequence: Synthetic polynucleotide
gatgcacagaggcaacggctaggggagcggaggttcaagccacatgtctgcgtcctcgggggccagagcccgccagccctcgcggatcccggctcgcggccagcccgagcggctcgggtgagtagcggcacagcggcc

SEQ ID NO: 1094 - DNA, 176 bp, Artificial Sequence
  Description of Artificial Sequence: Synthetic polynucleotide
ggcagggacatcttaagagctttgtccaggcctgcgccgttcagcatctcgcccgtgtcgggggctcggcggccccgggcgagagacggaggctacgcgcagggctgggcgcaggggccgccgcccgaggaccatgggtgggccagcgcctcgccgggctgctagctggcggggac

SEQ ID NO: 1095 - DNA, 171 bp, Artificial Sequence
  Description of Artificial Sequence: Synthetic polynucleotide
caccagtgcctacttttccacgcaccgcccgggatggccgcccccagacggccccggcccgcggccacccccgccatccccgcgcaggctctacgccgctccagctgccctccgaggccttcaagaaaacttgggcgccgccctccgaccgcagccccagccagagcttcc

SEQ ID NO: 1096 - DNA, 164 bp, Artificial Sequence
  Description of Artificial Sequence: Synthetic polynucleotide
gtggtgggcaagcggggccagcggagcgggaacccgcacaccctccgagcggagccgaggacaggcccgtgcgggccgcggggtccctctggcgccaggaagcggcggccgaaggagacaacgagaacgcagccccggctcagggaggcttaaaagctgagatg

SEQ ID NO: 1097 - DNA, 171 bp, Artificial Sequence
  Description of Artificial Sequence: Synthetic polynucleotide
cctggctggccgactggaccgccccatcgatgcggagcgcgagctgcttattgtcttccatcatgctcaggattttggcctgggggcgagagaggtgacaaagagctgcatgatgcgcggggggcgcgcggccgggcacccccggctctacctgttgtgtcctccgcggcc

SEQ ID NO: 1098 - DNA, 135 bp, Artificial Sequence
  Description of Artificial Sequence: Synthetic polynucleotide
ctcagcccgagtggggctcgtctgcactggcgccgtcggcctggcgggacgagtccccggcggtggcggaggtggcgtcagggcccccgccctcgatggagctctcgctgcccgtgctgtcgcctgacagcaggc

SEQ ID NO: 1099 - DNA, 228 bp, Artificial Sequence
  Description of Artificial Sequence: Synthetic polynucleotide
tggagtggtggagttgtagttggttygaggygggagttyggggagaggyggggtttttygtatttagttattttgtatgtgtgttygtatttatattttttataygygtgtygttttatttttttttttttttygtatttyggttttgygatygggggtyggggggaygyggggattyggttagggttgaggagggaggygyggggttgtagagatggygtggaagtt

SEQ ID NO: 1100 - DNA, 153 bp, Artificial Sequence
  Description of Artificial Sequence: Synthetic polynucleotide
atttttttgaaygaatatygyggttttttygaaygtygyggttttttygaaygtygyggttttttygaatatygyggtgttttygaatatygttgttttttygaatatygygattttttygaatatygtgatttttttagatatgtttagttg

SEQ ID NO: 1101 - DNA, 163 bp, Artificial Sequence
  Description of Artificial Sequence: Synthetic polynucleotide
ttatttaatagygtgttttygagttygttgatgttattgtattygtygtygtagttgtygttttttttgtagttttayggttagtaggtgttttattatttggagaaygagtttagyggttatayggtgygygaggtyggttygtyggtattttataggtatt

SEQ ID NO: 1102 - DNA, 191 bp, Artificial Sequence
  Description of Artificial Sequence: Synthetic polynucleotide
gygtagagtttygtagaggyggaygtygyggtaygygtttygaaaagttttaaatttttattttyggttttttygttttattttygtttygtagttaagattygygtygtggygggttygayggttaaggaaagtttattagtttttygtatygtgggygaygggttaagattyggttttaaayggttaga

SEQ ID NO: 1103 - DNA, 146 bp, Artificial Sequence
  Description of Artificial Sequence: Synthetic polynucleotide
gggygtataaaggaggtgtygggtygggtttgyggygggygggygggtyggggtggattygtyggtgtyggaygttttttgttyggtygggatttygygtygttggygtttaagttggygygttgyggagggttgyggggtgagtt

SEQ ID NO: 1104 - DNA, 160 bp, Artificial Sequence
  Description of Artificial Sequence: Synthetic polynucleotide
gattgtaggaagtgtgttagggaagttaayggaatygttggttygtyggtggtgygttyggtattaggaaagtttttaygatygttgaggtatygggtagttagtgttygttgttaaygyggagggaaygggyggagattgygggtaataygtggtagag

SEQ ID NO: 1105 - DNA, 160 bp, Artificial Sequence
  Description of Artificial Sequence: Synthetic polynucleotide
ttgttgttggatttttatattgtagttagtagtttaggaygttttyggtyggaygatgggtattygygtttgagtatttttygggtaggygttaggygygaaggtagggggygggaggaaaggggygggggaatttttgattttttggtggattttggaa

SEQ ID NO: 1106 - DNA, 180 bp, Artificial Sequence
  Description of Artificial Sequence: Synthetic polynucleotide
gtgattaagagatttagtatttygggttaggtaygyggtttttggtgttyggtgagygygggttgttggggygygggygygggyggtttgggtttggtttttgyggggagttttygggttgtgttttggggttaaygttttgattttyggggtyggtagtaggttgatygtgttgggtga

SEQ ID NO: 1107 - DNA, 153 bp, Artificial Sequence
  Description of Artificial Sequence: Synthetic polynucleotide
ggtttttttatgttttgagttttaaggattttgttygaggggttttyggggatttgggggyggttttttaatggagggtgygatagggaaagtttygagttygttttttttgggaaattaygygtatatttaggattttattttggtttggtt

SEQ ID NO: 1108 - DNA, 222 bp, Artificial Sequence
  Description of Artificial Sequence: Synthetic polynucleotide
ygttttyggggttttttggggaagagtyggtttttygygtygtaygttgggagtttgatttgttttttttagattatgtgggttttttatttgtatattttygaattatagatgaaaaygtatttaggattaagtgaattgtttttttttgagtttttttgggatagaaaaggaagtaggttttygttttagtttygttygttttttattttyggygttttt

SEQ ID NO: 1109 - DNA, 156 bp, Artificial Sequence
  Description of Artificial Sequence: Synthetic polynucleotide
gttgaggyggtttagagggttattaattaaatttttyggyggggygggttygggggyggggygtttttttggtttygtttttyggtttattgttttaygttgtttttttygaggygtttygttgagggyggygtgtggagagtttggggtgtttgt

SEQ ID NO: 1110 - DNA, 141 bp, Artificial Sequence
  Description of Artificial Sequence: Synthetic polynucleotide
ggygtttttaagagatagtttggagtaggygtttttgttgtaggttgygtgttgtttyggggyggtggtatttttttttttyggttttaatygttaggtttgtygtttgygttttttaggggttagttyggagttagagaa

SEQ ID NO: 1111 - DNA, 165 bp, Artificial Sequence
  Description of Artificial Sequence: Synthetic polynucleotide
ttttgtttattttgggtttggtggtttgygtgtyggyggagtyggtgagtgggttaggyggaggatgygygygtygtttagggtgtttgaagttaygagaggagttygtagggaataggggagygttatttggggaatttttagtttttaagtatatatyggaga

SEQ ID NO: 1112 - DNA, 141 bp, Artificial Sequence
  Description of Artificial Sequence: Synthetic polynucleotide
tygagttyggttttgagtatttagtaaggttaagtaggygaaggagggggygggggtttttgggygygttttygttygygtatagtyggggttttggaagggggtgtgygtagttygtygagttagtttygttygtttgtt

SEQ ID NO: 1113 - DNA, 193 bp, Artificial Sequence
  Description of Artificial Sequence: Synthetic polynucleotide
ttttggggtttttgygtttygggggygtggtaggttyggttttggtttaggtgygagtgygggagttgygtaagggygaagyggagyggggyggygygggyggtggygggaagttttttttattttgygtttgggatgggygygygtggtattattayggygtygtyggyggttttttgttgygygttygttt

SEQ ID NO: 1114 - DNA, 210 bp, Artificial Sequence
  Description of Artificial Sequence: Synthetic polynucleotide
tygtggttattatttygttttattttygtttttttgggtygtygtattygtttaygtgttygtttttttttgygtaaaattttaagatgagtaaatattgggtttayggtggagygtygygggggtttttttgagtyggggygggtygggggygggattagggttyggtyggggygtgttygaggggagggatttttyggtttgygattt

SEQ ID NO: 1115 - DNA, 192 bp, Artificial Sequence
  Description of Artificial Sequence: Synthetic polynucleotide
taaagttttattatatttttgggtygggyggtaggagtggggaygggagtggaggttttgyggagtagyggttyggggagttgtgggttgygggttgggyggggyggygygatgyggggygggyggtttagtttygttttttttatyggygtttttaggggatgaatgttttttttgayggtttttttattt

SEQ ID NO: 1116 - DNA, 186 bp, Artificial Sequence
  Description of Artificial Sequence: Synthetic polynucleotide
gttttttaatttggtttgttgaaygtaaatygttgagagtttgttgtatygttttttggggtttttggttgtygagtttygttaaggtaaagaygttagtaagygaggaagygtagyggaagaaaaataagygggygygygaggggagttttaggagggttgtygagtggttggtaggyggttttt

SEQ ID NO: 1117 - DNA, 155 bp, Artificial Sequence
  Description of Artificial Sequence: Synthetic polynucleotide
gggaagtgygggtggttgttygggtttttagaggtygtattatttattgtgttttaggttygtaggaagttagattttgygagaggtgtgtgggggyggagagtggtataggtttgatattgtaggtyggaggaggaagatagtggttgtaaagg

SEQ ID NO: 1118 - DNA, 255 bp, Artificial Sequence
  Description of Artificial Sequence: Synthetic polynucleotide
gtgtgtatgtgtgagggtgtgayggaggygtttaygtgttyggttygttygtgttayggtygtttatyggttgtagaggagaagggtaggttgtgggyggyggyggggygyggaggggtagttaggagygtaggttgggtttygtatttttttgttttaaaatttattgatgtagyggttattgyggttgtygagyggygtttttttagagttyggggttgtgttygttygatgtaggatgtaattgaggaagtt

SEQ ID NO: 1119 - DNA, 220 bp, Artificial Sequence
  Description of Artificial Sequence: Synthetic polynucleotide
ttttttgggygtttttagygaatgygagyggygaggygagggygagygygtygaggaagggygggagaggygyggagtttggtygygtygygttgygtygagygtygggtttttttygygagtttttygggttygygygygygttttttattgttttygtttttygygyggygygtgttttttatttttygtygygygttttygtattygttyggtttta

SEQ ID NO: 1120 - DNA, 200 bp, Artificial Sequence
  Description of Artificial Sequence: Synthetic polynucleotide
gagaygaagagaggyggtgagaaygygggtgtttagggattttattttyggttttygttgggggttygygagyggttyggggaygtttgggttggggaagyggggttgttatttttagggygggaggtagagaygatttagtttttggtttygtttttttygygaygygattttygaggggttttgggtygygtttgtag

SEQ ID NO: 1121 - DNA, 185 bp, Artificial Sequence
  Description of Artificial Sequence: Synthetic polynucleotide
tttggataaagtttttaagatgtttttgtygyggaggtygaggattygttygttygtgggtgagttgggaggggygyggygagggagggtgggttyggggygggggyggygyggggygygtttgyggttatgygatattgtttygttygygtttygtttttttttttgggttttttgggtttttt

SEQ ID NO: 1122 - DNA, 198 bp, Artificial Sequence
  Description of Artificial Sequence: Synthetic polynucleotide
agtygtaggtggagatattttagttgtgttttyggggatttygtttggtygttgygttttgygtttygtagtygttagagtygttttatttygygaygtttgggttgggygttttaaagtygttayggttttygttttttttaggttagtaaggygygygtttttttygttagtygttatggtggtttgggaaaggtt

SEQ ID NO: 1123 - DNA, 216 bp, Artificial Sequence
  Description of Artificial Sequence: Synthetic polynucleotide
agtttaattaaggatygtttagaggggtttttattttgaatttyggtttttttaaaggaagggtagattttagatttttttttttttttttygaaygtgttttgggtgtttttttgtttttttttttggtaagttaggatagygtatagtgtayggagtttygaagtttttttagttattttyggatttttggttaaatttgagggtgagttygaa

SEQ ID NO: 1124 - DNA, 194 bp, Artificial Sequence
  Description of Artificial Sequence: Synthetic polynucleotide
gyggagtttyggggaagagttttaaaggygygygttttttygtgtttygygtattygaaygggagtygyggagagttygtttttygttgtygtyggygtttyggggaggtaagtgttattygyggatttygagtygyggtygggtgggggyggttygyggttgtttygygttygggaagttttggttggggttg

SEQ ID NO: 1125 - DNA, 214 bp, Artificial Sequence
  Description of Artificial Sequence: Synthetic polynucleotide
ttygggggttttttttttgttaygtygttggggttygttygttatttatagttttygtagagtttttygggtatatygyggttggtygttyggggttaaggatggggygggagygtttatttattttygygtyggtyggggtatttaagaggygygttygtagttatayggygtttygtttttygtttygaaaaagtttttgtttttttggygt

SEQ ID NO: 1126 - DNA, 201 bp, Artificial Sequence
  Description of Artificial Sequence: Synthetic polynucleotide
ttggtttygtttgtttattayggygygtttaaatttaygyggttygyggttttttgygtgttttgtygatttygggtygtaggaggggttagtttygtyggtttttaygyggggtttgygtyggtagygttaygggttggaaygygtttygggagaaattattygygyggggtygyggygttttttgttttaattttygta

SEQ ID NO: 1127 - DNA, 108 bp, Artificial Sequence
  Description of Artificial Sequence: Synthetic polynucleotide
gttygggaggygggaagtgggtagtagygttttygtttggtttttgtgygtttygattygaygttttttygttygattaggtgtttygagagygtatagttgggaggg

SEQ ID NO: 1128 - DNA, 191 bp, Artificial Sequence
  Description of Artificial Sequence: Synthetic polynucleotide
ggattgggatttgtttttggggaattygtttagaagayggyggyggattggggtygggtattttttagggttgttaggttttttttagttttgtatttgtygygtygttttatttygttaggaagttttagagatttyggggatggggtgggagygtttttttatygygggtttaaaaagaaggaaggayg

SEQ ID NO: 1129 - DNA, 212 bp, Artificial Sequence
  Description of Artificial Sequence: Synthetic polynucleotide
ggatgaggttggttaggtgttygygttygggygtygataggtatygttgttgtygaaagygtygttttagttygtaggtttgygttttggagaaaagtattygtygttttygttttttgtyggygtttttttygtygttyggggtttttttgttattgttyggtgattygtyggtygagggtttyggggatttggagtttgagttttgaggg

SEQ ID NO: 1130 - DNA, 165 bp, Artificial Sequence
  Description of Artificial Sequence: Synthetic polynucleotide
ygtatttgtygggttattttgtttyggaggtaagtttagatttttyggtygygggggygggyggaggggttygtagtgggyggggtygyggtaggggtygygagttggyggygggagttggaggttgttttgygttggygggtgttttagttttggtttygtttt

SEQ ID NO: 1131 - DNA, 241 bp, Artificial Sequence
  Description of Artificial Sequence: Synthetic polynucleotide
agtttggagagaagttatttygggattttttattttttygttttttttttyggttttgttygagtttaggaggyggygttggygtgygttattttygttttagttaaggttttttgttygttygygtattygttygtygttygyggttygygygttttttttttttttygtttaagttaaataggttaaggttggggtygyggtagggatagggttyggggtagtttgggattagggaygt

SEQ ID NO: 1132 - DNA, 206 bp, Artificial Sequence
  Description of Artificial Sequence: Synthetic polynucleotide
tttagygtgtttgggaggtaaattygttgattagtttttgagaggagtggttagaggaatttaggyggggaaggggayggtggattttaggagagtgtaatttataaaggyggggggyggggaygtttaggttygagttttaggattttgygtyggaygtttygttygtttttttaggttttttgttyggttttygtattygygyg

SEQ ID NO: 1133 - DNA, 167 bp, Artificial Sequence
  Description of Artificial Sequence: Synthetic polynucleotide
ttgtttaatttttagggttttttatgttttttttgygtttygaygtgygagaatattgtttttggtagtgtagggygtttttatttattatttttttyggttgggttyggttagtagggagggtygttttgtgygygygttttttttttattttttagggyggygta

SEQ ID NO: 1134 - DNA, 155 bp, Artificial Sequence
  Description of Artificial Sequence: Synthetic polynucleotide
ttttatgtygttgtttagtttgygtttttygaatttttygggtatagttygttgtattggagttttaggagatatygttygtagtagygtayggagygagggatttttagttygggtygggagagtaaagtttygttggtttgttttggattgtt

SEQ ID NO: 1135 - DNA, 160 bp, Artificial Sequence
  Description of Artificial Sequence: Synthetic polynucleotide
ttttggttttttttttttagattyggatattgaagtaggyggtagygggtgtttttttatttggttattttttyggygtttagygygaggtagggtgggygaggygagggyggygttttgygagggagggyggtygtagaatttgygggtttttagygtt

SEQ ID NO: 1136 - DNA, 190 bp, Artificial Sequence
  Description of Artificial Sequence: Synthetic polynucleotide
gggtyggagtygtttgagtyggygggagygggtatttttgygygtygygttyggtttygttttygygtttttygygygttygtygyggtttttttttygygttygttygttygtygggttttygtygtygtttyggggtgtagtygagyggtygygtygggttttygggayggggtggaagtgggggtgg

SEQ ID NO: 1137 - DNA, 142 bp, Artificial Sequence
  Description of Artificial Sequence: Synthetic polynucleotide
gagagagttgttagggyggttttttygtttygggtttgttgggyggggtyggttaaggtgygygtgttygttggttttaayggttttgttgggygtttttgttgagaggygggaggggttgagagtttgtgygaaggtaggt

SEQ ID NO: 1138 - DNA, 179 bp, Artificial Sequence
  Description of Artificial Sequence: Synthetic polynucleotide
gatgygttgttgttgggaattggtyggygggagygyggttttagttttygttagtagttaygygygtttgggggyggygygttgygagyggttgagatygygggygggggygggygtttggtttgggtagygtttttagygyggtgtgggyggygagtttygtagggttgtaatygttt

SEQ ID NO: 1139 - DNA, 178 bp, Artificial Sequence
  Description of Artificial Sequence: Synthetic polynucleotide
agttagagggtttgyggtggtygagggagggattttaygayggggagttygttyggtgtygttttttttttttttttygttttttygttttttttatttygtttttttygtygatttygggagygaygggygttygtgatttgygaaygttgttaagtgayggttttygagtttgaag

SEQ ID NO: 1140 - DNA, 123 bp, Artificial Sequence
  Description of Artificial Sequence: Synthetic polynucleotide
ttggagtaaggayggtaaggagttaygtgayggttttaagtatygttaygttttygaggattttgaygtggtggtattggtggtgygygayggygagttggtagatttgggttagtatagtat

SEQ ID NO: 1141 - DNA, 193 bp, Artificial Sequence
  Description of Artificial Sequence: Synthetic polynucleotide
gttgggagtggggatattggatyggaggggattttttaygggagtattygttgtttttattygtttyggaaygyggttggattyggagttttygatygtagttygygtaygattttygggagtttgttttygyggtygtygatttaygttygygttgtygttttattgttaggtggttygagagatgtaggag

SEQ ID NO: 1142 - DNA, 188 bp, Artificial Sequence
  Description of Artificial Sequence: Synthetic polynucleotide
gaatggtaggttttatttaaagagtgtttggtggygygyggtgttttttttggagtagttttyggygttygttygtyggggtttyggygatygttgttttttttttttttttttttttttttttttttttttygtttttttttttygtygtttygttatygtygyggttagggttggaggygtygttg

SEQ ID NO: 1143 - DNA, 206 bp, Artificial Sequence
  Description of Artificial Sequence: Synthetic polynucleotide
tgtttagagttyggatttagtagttyggtttygygttttttttgtttygyggttygtaggtttagtttttaagygtttagttttygyggtttttgtggygttatagttagtttgaagaatggttgttttggagaygtaaatttaagagttttgtttttggagttgagaattgtagygyggaggtttyggagygagtyggggtagtt

SEQ ID NO: 1144 - DNA, 168 bp, Artificial Sequence
  Description of Artificial Sequence: Synthetic polynucleotide
ggatttgttggatattttggagaatggtygtggggaggygttaggaggyggygggggttttttgggttygggggtygggtygtygtttttgttgttgggtagygttttygatatgaaggttgagttgtygtaatttattagygatttgggygagtttagtttyggtaa

SEQ ID NO: 1145 - DNA, 242 bp, Artificial Sequence
  Description of Artificial Sequence: Synthetic polynucleotide
ygtttattgygtgttgttttygttygtttttttttttttygttttttttttttttttttttgttttygygtygtttygygtttttygttygttgtagtyggygaggagygtygtaygttggtttyggygygaggagttttygggttttygggygggtattggagtaaggagttgygagygtagttygaggyggggtayggyggaaggygyggygagagyggggtttttgygagygtagtygg

SEQ ID NO: 1146 - DNA, 183 bp, Artificial Sequence
  Description of Artificial Sequence: Synthetic polynucleotide
ttattatttattaygattaggtttttatygattgttagggyggygattttttgaaggtgaggygtttayggttagttaatttagtyggagggyggtaygggagggttggaaagggttggggygttgtatttagygtggggttgttgagygtaggtagttagtggtattttttagatatttygt

SEQ ID NO: 1147 - DNA, 197 bp, Artificial Sequence
  Description of Artificial Sequence: Synthetic polynucleotide
ggtttagaggtttttggttggygggygtttygtyggtygtyggttttttttttgaaattygtyggygtatatgaggtygttgttttygtygtaggygttggyggttttttygyggtgttygtggtgatgttatgtttygttattaygygggaggagaggagggyggygtygtygggttttgggtgaagagyggygta

SEQ ID NO: 1148 - DNA, 181 bp, Artificial Sequence
  Description of Artificial Sequence: Synthetic polynucleotide
ggattyggtgaattttttttgtagygaaagtaatttagatggaygygggaattgaygtatyggtatagaggattagygygtttttaagtygattttygggtyggtttttygttgttttttygtaatttttttttttttaggattttttygtyggagttttggtttatygtgattttggggt

SEQ ID NO: 1149 - DNA, 228 bp, Artificial Sequence
  Description of Artificial Sequence: Synthetic polynucleotide
gatttttaygttatttttgtagtttygygtttttttttttagttttggtygggttttygygttttttygattttygatygtaaagtyggggtgygagagggaaagggaagtgaggyggtaygygtatggagggtgtgagtgyggatatatatatagggtggttaggtaygaaaaatttygttttttttygaattttygtttyggattagttgtagttttattatttta

SEQ ID NO: 1150 - DNA, 153 bp, Artificial Sequence
  Description of Artificial Sequence: Synthetic polynucleotide
tagttgggtatgtttggggagattaygatgttyggggagatygygatgttyggggagatagygatgttygggggtatygygatgttyggggagatygygaygttyggagggatygygaygttyggggagatygygatgttygtttagggagat

SEQ ID NO: 1151 - DNA, 163 bp, Artificial Sequence
  Description of Artificial Sequence: Synthetic polynucleotide
ggtatttgtagaatgtyggygggtyggtttygygtatygtgtagtygttgggttygttttttaggtagtagggtatttgttggtygtggggttgtaggaaaggygatagttgyggyggygggtgtagtagtattagygggttyggagataygttgttgagtgg

SEQ ID NO: 1152 - DNA, 191 bp, Artificial Sequence
  Description of Artificial Sequence: Synthetic polynucleotide
tttggtygtttagggtygggttttggttygtygtttayggtgyggagggttggtgggttttttttggtygtygggttygttayggygygggttttggttgyggggyggaggtggggygggagagtygaggataagagtttgaggtttttygaggygygtgtygyggygttygtttttgygggattttgygt

SEQ ID NO: 1153 - DNA, 146 bp, Artificial Sequence
  Description of Artificial Sequence: Synthetic polynucleotide
ggtttatttygtagtttttygtaaygygttaatttggaygttagyggygyggggtttyggtygggtagggggygttyggtatyggygggtttatttyggttygttygttygtygtaagttyggttyggtattttttttgtgygttt

SEQ ID NO: 1154 - DNA, 160 bp, Artificial Sequence
  Description of Artificial Sequence: Synthetic polynucleotide
ttttgttaygtgttgttygtagttttygttygtttttttygygttggtaaygggtattgattgttygatattttagygatygtagagatttttttaatgtygggygtattatyggygggttagyggtttygttggtttttttgatatattttttatagtt

SEQ ID NO: 1155 - DNA, 160 bp, Artificial Sequence
  Description of Artificial Sequence: Synthetic polynucleotide
ttttagggtttattagggaattaggaattttttygttttttttttttygttttttgttttygygtttggygtttgttygggggatgtttaggygygggtatttatygttyggtygggggygttttgggttgttggttgtagtgtgaagatttagtagtag

SEQ ID NO: 1156 - DNA, 180 bp, Artificial Sequence
  Description of Artificial Sequence: Synthetic polynucleotide
ttatttagtayggttagtttgttgtyggtttygaaagttaggaygttggttttagagtatagttyggggatttttygtaaaaattagatttaagtygttygygttygygttttagtagttygygtttatygagtattaggagtygygtgtttggttygaagtattgggttttttggttat

SEQ ID NO: 1157 - DNA, 153 bp, Artificial Sequence
  Description of Artificial Sequence: Synthetic polynucleotide
ggttagattaaagtagaattttgggtgtgygygtgattttttagggagggyggattyggggttttttttgtygtattttttattgggggatygtttttaagttttygagagtttttygggtagagtttttagggtttagagtatgggaggatt

SEQ ID NO: 1158 - DNA, 222 bp, Artificial Sequence
  Description of Artificial Sequence: Synthetic polynucleotide
gggagygtyggggatgggggaygggyggggttggagyggggatttatttttttttttgttttaagaggatttaaaggaaaataatttatttgattttggataygtttttatttataattyggaaatatgtaaatgaaaggtttatatggtttgaaaggggtaaattaagtttttagygtgyggygyggggaatyggtttttttttagggagtttyggaggyg

SEQ ID NO: 1159 - DNA, 156 bp, Artificial Sequence
  Description of Artificial Sequence: Synthetic polynucleotide
gtagatattttaaattttttataygtygtttttagygaggygtttyggggaaagtagygtgaggtagtgagtygaggggyggggttaggaggaygtttygttttygagttygtttygtyggagggtttgattaatgattttttaagtygttttagt

SEQ ID NO: 1160 - DNA, 141 bp, Artificial Sequence
  Description of Artificial Sequence: Synthetic polynucleotide
ttttttggtttygggttggtttttgaggggygtaaayggtaggtttggyggttggggtygaggagggagggtattatygtttygaggtagtaygtagtttgtagtagaggygtttgttttaagttgttttttgggggygtt

SEQ ID NO: 1161 - DNA, 167 bp, Artificial Sequence
  Description of Artificial Sequence: Synthetic polynucleotide
gattttyggtgtatatttggggattgggggttttttaggtggygtttttttattttttgygggtttttttygtagttttaaatattttaaayggygygygtatttttygtttggtttatttatygatttygtygataygtaggttattaagtttaaggtgagtagga

SEQ ID NO: 1162 - DNA, 141 bp, Artificial Sequence
  Description of Artificial Sequence: Synthetic polynucleotide
ggtaggygagygggattgattyggygggttgygtatatttttttttaaggtttygattgtgygyggaygggggygygtttaggaattttygttttttttttygtttgtttgattttgttgggtatttaaagtyggattygg

SEQ ID NO: 1163 - DNA, 193 bp, Artificial Sequence
  Description of Artificial Sequence: Synthetic polynucleotide
gggygaaygygtagtaggaagtygtyggyggygtygtggtggtgttaygygygtttattttaggygtagagtgaaaagagtttttygttatygttygygtygtttygtttygtttygtttttgygtagttttygtattygtatttggattagggtygagtttgttaygttttygggaygtaagggttttagga

SEQ ID NO: 1164 - DNA, 210 bp, Artificial Sequence
  Description of Artificial Sequence: Synthetic polynucleotide
gggtygtaagtyggggagttttttttttygggtaygtttyggtyggattttggtttygttttygattygtttyggtttaggggggttttygyggygttttatygtgagtttagtatttgtttattttggaattttgygtagggagagaygggtaygtggaygaatgyggyggtttaaagagaygggaatgaagygaggtggtggttaygg

SEQ ID NO: 1165 - DNA, 192 bp, Artificial Sequence
  Description of Artificial Sequence: Synthetic polynucleotide
aagtaaagagatygttaggagggatatttattttttgagggygtyggtagggggagyggggttgagtygttygtttygtatygygtygtttygtttagttygtagtttatagtttttygagtygttgtttygtaagatttttattttygtttttatttttgtygttyggtttagaagtgtggtgggattttg

SEQ ID NO: 1166 - DNA, 186 bp, Artificial Sequence
  Description of Artificial Sequence: Synthetic polynucleotide
gggagtygtttgttagttattyggtagtttttttggggtttttttygygygttygtttgtttttttttygttgygttttttygtttgttggygtttttgttttagygggattyggtagttaggggttttagggggyggtgtagtaaatttttagyggtttgygtttagtagattaggttggggagt

SEQ ID NO: 1167 - DNA, 155 bp, Artificial Sequence
  Description of Artificial Sequence: Synthetic polynucleotide
tttttgtagttattgtttttttttttygatttgtagtgttaaatttgtgttatttttygtttttatatatttttygtaaggtttggttttttgygagtttggaatataataggtggtgyggtttttgagggttygggtagttattygtatttttt

SEQ ID NO: 1168 - DNA, 255 bp, Artificial Sequence
  Description of Artificial Sequence: Synthetic polynucleotide
ggtttttttagttgtattttgtatygggygggtatagtttygggttttgggaagaygtygttyggtagtygtagtggtygttgtattaatgggttttggggtagggaggtgyggagtttagtttgygtttttggttattttttygygtttygtygtygtttatagtttattttttttttttgtagtyggtaggyggtygtaataygggygggtygagtaygtgggygttttygttatatttttatatatatatat

SEQ ID NO: 1169 - DNA, 220 bp, Artificial Sequence
  Description of Artificial Sequence: Synthetic polynucleotide
tggagtygggygggtgygagggygygyggyggggggtggggggtaygygtygygyggggggygggggtagtggggggygygygygygggttyggggagttygyggggagagttyggygttyggygtagygyggygyggttaagtttygygtttttttygttttttttyggygygttygttttygtttygtygttygtattygttgggggygtttagaaag

SEQ ID NO: 1170 - DNA, 200 bp, Artificial Sequence
  Description of Artificial Sequence: Synthetic polynucleotide
ttgtaggygyggtttagggtttttygggggtygygtygyggagggggygaagttaggagttggatygtttttgtttttygttttgggggtaatagtttygtttttttagtttagaygttttygagtygttygygggtttttagygggagtygggggtggggtttttaagtattygygtttttatygttttttttygtttt

SEQ ID NO: 1171 - DNA, 185 bp, Artificial Sequence
  Description of Artificial Sequence: Synthetic polynucleotide
agagagtttagggagtttagggaggggagyggggygygggyggggtagtgtygtataatygtaggygygtttygygtygttttygtttygggtttattttttttygtygygttttttttagtttatttayggaygagyggattttygattttygyggtagggatattttaagagttttgtttagg

SEQ ID NO: 1172 - DNA, 198 bp, Artificial Sequence
  Description of Artificial Sequence: Synthetic polynucleotide
ggttttttttaggttattatagyggttggyggagggagygygygttttgttggtttggagggggygggggtygtggyggttttaaagygtttagtttaggygtygyggggtggggyggttttggyggttgyggggygtagggygtagyggttaagyggggttttyggaagtatagttggggtgtttttatttaygatt

SEQ ID NO: 1173 - DNA, 216 bp, Artificial Sequence
  Description of Artificial Sequence: Synthetic polynucleotide
ttygggtttatttttaggtttaattagaaattygggagtagttgagagagtttyggagtttygtgtattgtgygttgttttgatttgttaaaaaagaaagtagaaaaatatttaaagtaygttygagaagagaagggggaaatttggggtttgttttttttttagaaaagtygaggtttagggtgagagtttttttgagyggtttttggttgagtt

SEQ ID NO: 1174 - DNA, 194 bp, Artificial Sequence
  Description of Artificial Sequence: Synthetic polynucleotide
tagttttagttagagtttttygagygyggggtagtygygggtygtttttattyggtygygattygggattygygggtggtatttattttttygaggygtyggyggtagygggaggygagtttttygyggttttygttygagtgygyggggtayggaggagygygygtttttaagattttttttygagatttygt

SEQ ID NO: 1175 - DNA, 214 bp, Artificial Sequence
  Description of Artificial Sequence: Synthetic polynucleotide
gygttaggggagtaggagttttttyggagygggaggyggggygtygtgtggttgygagygygttttttggatgtttyggtyggygygggggtgggtgggygttttygttttatttttggtttygggyggttagtygyggtgtgttyggagggttttgygagggttgtgggtggygggygagttttagyggygtagtagaggaggggttttygag

SEQ ID NO: 1176 - DNA, 201 bp, Artificial Sequence
  Description of Artificial Sequence: Synthetic polynucleotide
taygggagttggggtagaagaygtygygatttygygygggtaatttttttygaggygygttttagttygtggygttgtyggygtagatttygygtggggatyggygaggttaattttttttgyggttyggggtyggtagagtaygtaaggggtygygggtygygtgggtttgggygygtygtggtgggtaagyggggttag

SEQ ID NO: 1177 - DNA, 108 bp, Artificial Sequence
  Description of Artificial Sequence: Synthetic polynucleotide
tttttttagttgtgygttttygaggtatttggtygggyggggaggygtygggtyggggygtataggggttaggygggggygttgttgtttatttttygtttttygggt

SEQ ID NO: 1178 - DNA, 191 bp, Artificial Sequence
  Description of Artificial Sequence: Synthetic polynucleotide
ygtttttttttttttttgagttygygatgggaaggygtttttattttattttyggggtttttgagattttttggygaggtggggyggygyggtaggtgtagggttggggagggtttgatagttttggagagtgttygattttagttygtygtygttttttaggyggattttttagaggtaggttttagttt

SEQ ID NO: 1179 - DNA, 212 bp, Artificial Sequence
  Description of Artificial Sequence: Synthetic polynucleotide
tttttaggatttaagttttaagttttyggagttttyggtygaygagttatyggataatgataaggagatttygggyggygggggggaygtyggtaagaagygaaagyggygagtgtttttttttaaggygtagatttaygagttggagyggygttttyggtagtagyggtatttgtyggygttygagygygaatatttggttagttttattt

SEQ ID NO: 1180 - DNA, 165 bp, Artificial Sequence
  Description of Artificial Sequence: Synthetic polynucleotide
gaggyggagttaggattaggatattygttagygtagggtagtttttagttttygtygttagttygyggtttttgtygygatttygtttattgygggttttttygttygttttygyggtygggaggtttggatttattttygggataaggtgattyggtaagtgyg

SEQ ID NO: 1181 - DNA, 241 bp, Artificial Sequence
  Description of Artificial Sequence: Synthetic polynucleotide
aygtttttagttttagattatttyggattttgtttttgtygyggttttagttttgatttgtttgatttgagygagagggaggaagggygygygggtygygggygaygggygggtgygygggygggtaggggattttggttaaggygagagtagygtaygttagygtygttttttagattygagtagagtyggagagagagaygagagggtgggaggtttyggagtaatttttttttaggtt

SEQ ID NO: 1182 - DNA, 206 bp, Artificial Sequence
  Description of Artificial Sequence: Synthetic polynucleotide
ygygygggtaygaggatygggtaggggatttgaaagggygggygaagygttyggygtagagttttgggattyggatttgggygttttygtttttygtttttgtaaattatatttttttggagtttatygttttttttttygtttggatttttttagttattttttttaagagttagttaaygagtttgttttttaaataygttgga

SEQ ID NO: 1183 - DNA, 167 bp, Artificial Sequence
  Description of Artificial Sequence: Synthetic polynucleotide
tgygtygttttgggaagtgaagagggagygygygtatagggyggttttttttgttggtygggtttagtygaggggagtaataagtgggggygttttgtattgttaagggtagtgttttygtaygtyggggygtagagggggtatgaagaattttggaaattgggtag

SEQ ID NO: 1184 - DNA, 155 bp, Artificial Sequence
  Description of Artificial Sequence: Synthetic polynucleotide
aataatttagagtaggttaaygaggttttgttttttygattygaattaaaggtttttygtttygtgygttgttaygagyggtgttttttggggttttaatgtagygagttgtgttygaggggttyggaaggygtaagttgggtagygatatgggg

SEQ ID NO: 1185 - DNA, 160 bp, Artificial Sequence
  Description of Artificial Sequence: Synthetic polynucleotide
ggygttgaaggttygtaggttttgygatygttttttttygtagggygtygttttygtttygtttattttgtttygygttaggygtygaaggggtagttaggtaggaagatattygttatygtttgttttagtgttyggatttaaagggaagaaattaagg

SEQ ID NO: 1186 - DNA, 190 bp, Artificial Sequence
  Description of Artificial Sequence: Synthetic polynucleotide
ttatttttatttttatttygtttyggggattyggygyggtygttyggttgtatttyggggyggyggygggggttyggygagyggaygggygygggggagggatygyggygggygygyggggggygyggaggygaggtygagygyggygygtaggggtgttygttttygtyggtttaagyggtttyggttt

SEQ ID NO: 1187 - DNA, 142 bp, Artificial Sequence
  Description of Artificial Sequence: Synthetic polynucleotide
atttattttygtatagatttttagtttttttygttttttagtagaaaygtttaatagaatygttaggattagygagtaygygtattttagtyggtttygtttaataggttygaggyggagaaatygttttagtagttttttt

SEQ ID NO: 1188 - DNA, 179 bp, Artificial Sequence
  Description of Artificial Sequence: Synthetic polynucleotide
gaaygattgtagttttgyggggttygtygtttatatygygttgaggaygttgtttaagttaggygttygttttygttygyggttttagtygttygtagygygtygtttttagaygygygtggttgttggygagggttgagatygygttttygtyggttagtttttagtagtagygtatt

SEQ ID NO: 1189 - DNA, 178 bp, Artificial Sequence; identical to SEQ ID NO: 1139
  Description of Artificial Sequence: Synthetic polynucleotide

SEQ ID NO: 1190 - DNA, 123 bp, Artificial Sequence
  Description of Artificial Sequence: Synthetic polynucleotide
atgttgtattggtttaggtttgttagttygtygtygygtattattagtgttattaygttagggttttygaagaygtagyggtatttgggatygttaygtagttttttgtygtttttattttag

SEQ ID NO: 1191 - DNA, 193 bp, Artificial Sequence
  Description of Artificial Sequence: Synthetic polynucleotide
tttttgtatttttygggttatttggtagtggggyggtagygyggaygtgggtyggyggtygyggagataggttttygggggtygtgygygggttgyggtyggggatttygggtttagtygygtttygagaygagtgagggtagygagtattttygtgaagggtttttttygatttagtgtttttatttttagt

SEQ ID NO: 1192 - DNA, 188 bp, Artificial Sequence
  Description of Artificial Sequence: Synthetic polynucleotide
tagyggygtttttagttttagtygyggyggtggygaggyggyggggggaggaggyggaggagaaaaaagaggaggagaaggaggaggaggagtagygatygtygagatttyggygggygggygtygagagttgttttaagaaggatatygygygttattaggtattttttaaatggagtttattattt

SEQ ID NO: 1193 - DNA, 206 bp, Artificial Sequence
  Description of Artificial Sequence: Synthetic polynucleotide
gattgtttyggttygtttygaagttttygygttgtagtttttagttttaggagtagggtttttgggtttaygtttttaaggtaattattttttaggttggttgtgaygttataaaggtygyggaggttgggygtttgagggttgggtttgygggtygygggatagggagggygyggggtygggttgttgggttygagttttgggta

SEQ ID NO: 1194 - DNA, 168 bp, Artificial Sequence
  Description of Artificial Sequence: Synthetic polynucleotide
ttgtygaagttgagttygtttaggtygttaataagttgygatagtttagtttttatgtyggaggygttgtttagtagtagaggyggyggttyggttttygggtttagggagttttygtygttttttagygtttttttayggttattttttagagtatttaataagttt

SEQ ID NO: 1195 - DNA, 242 bp, Artificial Sequence
  Description of Artificial Sequence: Synthetic polynucleotide
tygattgygttygtagggatttygttttygtygygtttttygtygtgtttygtttygggttgygttygtagttttttattttagtgttygttygggaattygggagtttttygygtyggggttaaygtgyggygtttttygtyggttatagygggygggagaygygaggyggygygggagtaggggaaggaggggaaggagygggggaggaggggayggaygaaggtagtaygtagtgggyg

SEQ ID NO: 1196 - DNA, 183 bp, Artificial Sequence
  Description of Artificial Sequence: Synthetic polynucleotide
gygaagtgtttaagaagtgttattggttatttaygtttagtagttttaygttgggtgtagygttttagttttttttaattttttygtgtygtttttyggttaggttggttggtygtgggygttttatttttaggaagtygtygttttgatagtygatggagatttggtygtagtggatggtaa

SEQ ID NO: 1197 - DNA, 197 bp, Artificial Sequence
  Description of Artificial Sequence: Synthetic polynucleotide
tgygtygttttttatttagagttyggyggygtygttttttttttttttygygtggtggyggggtatggtattattaygggtatygygagggggtygttagygtttgyggygggggtagyggttttatgtgygtyggygggttttaaggaggaagtyggyggtygayggggygttygttagttagagatttttgagtt

SEQ ID NO: 1198 - DNA, 181 bp, Artificial Sequence
  Description of Artificial Sequence: Synthetic polynucleotide
gttttaaggttayggtgagttagggtttygayggggaggttttgggagggaggaggttgygggagggtagygaggggtyggttygggagtyggtttgagggygygttgattttttgtgtyggtgygttagttttygygtttatttgggttgttttygttgtaggggagatttatygagttt

SEQ ID NO: 1199 - DNA, 196 bp, Artificial Sequence
  Description of Artificial Sequence: Synthetic polynucleotide
ttaattgttttttttaagtataggtygtygygtttttaattttttgtttttatttyggttygttygttttttttttygttttttttygattgtagygggggtagygttttggygtttttaaggatttttygttattttttttataaagtagyggyggtggyggyggttgttgttggatttttatattgtagttagt

SEQ ID NO: 1200 - DNA, 138 bp, Artificial Sequence
  Description of Artificial Sequence: Synthetic polynucleotide
ggtygttgtgtygttatttattygagtygttygggttggtygygagtygggattygygagggttggygggttttggttttygaggaygtagatatgtggtttgaattttygtttttttagtygttgtttttgtgtatt

SEQ ID NO: 1201 - DNA, 176 bp, Artificial Sequence
  Description of Artificial Sequence: Synthetic polynucleotide
gttttygttagttagtagttyggygaggygttggtttatttatggttttygggyggyggtttttgygtttagttttgygygtagttttygtttttygttyggggtygtygagttttygataygggygagatgttgaayggygtaggtttggataaagtttttaagatgtttttgtt

SEQ ID NO: 1202 - DNA, 171 bp, Artificial Sequence
  Description of Artificial Sequence: Synthetic polynucleotide
ggaagttttggttggggttgyggtyggagggyggygtttaagtttttttgaaggtttyggagggtagttggagyggygtagagtttgygyggggatggygggggtggtygygggtyggggtygtttgggggyggttatttygggyggtgygtggaaaagtaggtattggtg

SEQ ID NO: 1203 - DNA, 164 bp, Artificial Sequence
  Description of Artificial Sequence: Synthetic polynucleotide
tattttagtttttaagtttttttgagtyggggttgygttttygttgtttttttyggtygtygttttttggygttagagggatttygyggttygtaygggtttgttttyggtttygttyggagggtgtgygggttttygtttygttggtttygtttgtttattat

SEQ ID NO: 1204 - DNA, 171 bp, Artificial Sequence
  Description of Artificial Sequence: Synthetic polynucleotide
ggtygyggaggatataataggtagagtygggggtgttyggtygygygtttttygygtattatgtagttttttgttatttttttygtttttaggttaaaattttgagtatgatggaagataataagtagttygygtttygtatygatggggyggtttagtyggttagttagg

SEQ ID NO: 1205 - DNA, 135 bp, Artificial Sequence
  Description of Artificial Sequence: Synthetic polynucleotide
gtttgttgttaggygatagtaygggtagygagagttttatygagggygggggttttgaygttattttygttatygtyggggattygtttygttaggtygayggygttagtgtagaygagttttattygggttgag

SEQ ID NO: 1206 - DNA, 196 bp, Artificial Sequence
  Description of Artificial Sequence: Synthetic polynucleotide
gttggttgtagtgtgaagatttagtagtagtygtygttatygtygttgttttgtggggagagtggyggggagtttttgggagygttaaagygttgttttygttgtagtygggagagggyggaggaggagaygggygggtyggggtgaggatagggagttggggaygyggygatttgtgtttgaggagggtagttag

SEQ ID NO: 1207 - DNA, 138 bp, Artificial Sequence
  Description of Artificial Sequence: Synthetic polynucleotide
gatgtatagaggtaayggttaggggagyggaggtttaagttatatgtttgygttttygggggttagagttygttagttttygyggatttyggttygyggttagttygagyggttygggtgagtagyggtatagyggtt

SEQ ID NO: 1208 - DNA, 176 bp, Artificial Sequence
  Description of Artificial Sequence: Synthetic polynucleotide
ggtagggatattttaagagttttgtttaggtttgygtygtttagtatttygttygtgtygggggttyggyggtttygggygagagayggaggttaygygtagggttgggygtaggggtygtygttygaggattatgggtgggttagygtttygtygggttgttagttggyggggat

SEQ ID NO: 1209 - DNA, 171 bp, Artificial Sequence
  Description of Artificial Sequence: Synthetic polynucleotide
tattagtgtttatttttttaygtatygttygggatggtygtttttagayggtttyggttygyggttattttygttattttygygtaggttttaygtygttttagttgtttttygaggtttttaagaaaatttgggygtygtttttygatygtagttttagttagagttttt

SEQ ID NO: 1210 - DNA, 164 bp, Artificial Sequence
  Description of Artificial Sequence: Synthetic polynucleotide
gtggtgggtaagyggggttagyggagygggaattygtatatttttygagyggagtygaggataggttygtgygggtygyggggtttttttggygttaggaagyggyggtygaaggagataaygagaaygtagtttyggtttagggaggtttaaaagttgagatg

SEQ ID NO: 1211 - DNA, 171 bp, Artificial Sequence
  Description of Artificial Sequence: Synthetic polynucleotide
tttggttggtygattggatygttttatygatgyggagygygagttgtttattgttttttattatgtttaggattttggtttgggggygagagaggtgataaagagttgtatgatgygyggggggygygyggtygggtattttyggttttatttgttgtgtttttygyggtt

SEQ ID NO: 1212 - DNA, 135 bp, Artificial Sequence
  Description of Artificial Sequence: Synthetic polynucleotide
tttagttygagtggggttygtttgtattggygtygtyggtttggygggaygagttttyggyggtggyggaggtggygttagggttttygttttygatggagttttygttgttygtgttgtygtttgatagtaggt

SEQ ID NO: 1213 - DNA, 228 bp, Artificial Sequence
  Description of Artificial Sequence: Synthetic polynucleotide
tggagtggtggagttgtagttggttcgaggcgggagttcggggagaggcggggtttttcgtatttagttattttgtatgtgtgttcgtatttatattttttatacgcgtgtcgttttatttttttttttttttcgtatttcggttttgcgatcgggggtcggggggacgcggggattcggttagggttgaggagggaggcgcggggttgtagagatggcgtggaagtt

SEQ ID NO: 1214 - DNA, 153 bp, Artificial Sequence
  Description of Artificial Sequence: Synthetic polynucleotide
atttttttgaacgaatatcgcggttttttcgaacgtcgcggttttttcgaacgtcgcggttttttcgaatatcgcggtgttttcgaatatcgttgttttttcgaatatcgcgattttttcgaatatcgtgatttttttagatatgtttagttg

SEQ ID NO: 1215 - DNA, 163 bp, Artificial Sequence
  Description of Artificial Sequence: Synthetic polynucleotide
ttatttaatagcgtgttttcgagttcgttgatgttattgtattcgtcgtcgtagttgtcgttttttttgtagttttacggttagtaggtgttttattatttggagaacgagtttagcggttatacggtgcgcgaggtcggttcgtcggtattttataggtatt

SEQ ID NO: 1216 - DNA, 191 bp, Artificial Sequence
  Description of Artificial Sequence: Synthetic polynucleotide
gcgtagagtttcgtagaggcggacgtcgcggtacgcgtttcgaaaagttttaaatttttattttcggttttttcgttttattttcgtttcgtagttaagattcgcgtcgtggcgggttcgacggttaaggaaagtttattagtttttcgtatcgtgggcgacgggttaagattcggttttaaacggttaga

SEQ ID NO: 1217 - DNA, 146 bp, Artificial Sequence
  Description of Artificial Sequence: Synthetic polynucleotide
gggcgtataaaggaggtgtcgggtcgggtttgcggcgggcgggcgggtcggggtggattcgtcggtgtcggacgttttttgttcggtcgggatttcgcgtcgttggcgtttaagttggcgcgttgcggagggttgcggggtgagtt

SEQ ID NO: 1218 - DNA, 160 bp, Artificial Sequence
  Description of Artificial Sequence: Synthetic polynucleotide
gattgtaggaagtgtgttagggaagttaacggaatcgttggttcgtcggtggtgcgttcggtattaggaaagtttttacgatcgttgaggtatcgggtagttagtgttcgttgttaacgcggagggaacgggcggagattgcgggtaatacgtggtagag

SEQ ID NO: 1219 - DNA, 160 bp, Artificial Sequence
  Description of Artificial Sequence: Synthetic polynucleotide
ttgttgttggatttttatattgtagttagtagtttaggacgttttcggtcggacgatgggtattcgcgtttgagtatttttcgggtaggcgttaggcgcgaaggtagggggcgggaggaaaggggcgggggaatttttgattttttggtggattttggaa

SEQ ID NO: 1220 - DNA, 180 bp, Artificial Sequence
  Description of Artificial Sequence: Synthetic polynucleotide
gtgattaagagatttagtatttcgggttaggtacgcggtttttggtgttcggtgagcgcgggttgttggggcgcgggcgcgggcggtttgggtttggtttttgcggggagttttcgggttgtgttttggggttaacgttttgattttcggggtcggtagtaggttgatcgtgttgggtga

SEQ ID NO: 1221 - DNA, 153 bp, Artificial Sequence
  Description of Artificial Sequence: Synthetic polynucleotide
ggtttttttatgttttgagttttaaggattttgttcgaggggttttcggggatttgggggcggttttttaatggagggtgcgatagggaaagtttcgagttcgttttttttgggaaattacgcgtatatttaggattttattttggtttggtt

SEQ ID NO: 1222 - DNA, 222 bp, Artificial Sequence
  Description of Artificial Sequence: Synthetic polynucleotide
cgttttcggggttttttggggaagagtcggtttttcgcgtcgtacgttgggagtttgatttgttttttttagattatgtgggttttttatttgtatattttcgaattatagatgaaaacgtatttaggattaagtgaattgtttttttttgagtttttttgggatagaaaaggaagtaggttttcgttttagtttcgttcgttttttattttcggcgttttt

SEQ ID NO: 1223 - DNA, 156 bp, Artificial Sequence
  Description of Artificial Sequence: Synthetic polynucleotide
gttgaggcggtttagagggttattaattaaatttttcggcggggcgggttcgggggcggggcgtttttttggtttcgtttttcggtttattgttttacgttgtttttttcgaggcgtttcgttgagggcggcgtgtggagagtttggggtgtttgt

SEQ ID NO: 1224 - DNA, 141 bp, Artificial Sequence
  Description of Artificial Sequence: Synthetic polynucleotide
ggcgtttttaagagatagtttggagtaggcgtttttgttgtaggttgcgtgttgtttcggggcggtggtatttttttttttcggttttaatcgttaggtttgtcgtttgcgttttttaggggttagttcggagttagagaa

SEQ ID NO: 1225 - DNA, 165 bp, Artificial Sequence
  Description of Artificial Sequence: Synthetic polynucleotide
ttttgtttattttgggtttggtggtttgcgtgtcggcggagtcggtgagtgggttaggcggaggatgcgcgcgtcgtttagggtgtttgaagttacgagaggagttcgtagggaataggggagcgttatttggggaatttttagtttttaagtatatatcggaga

SEQ ID NO: 1226 - DNA, 141 bp, Artificial Sequence
  Description of Artificial Sequence: Synthetic polynucleotide
tcgagttcggttttgagtatttagtaaggttaagtaggcgaaggagggggcgggggtttttgggcgcgttttcgttcgcgtatagtcggggttttggaagggggtgtgcgtagttcgtcgagttagtttcgttcgtttgtt

SEQ ID NO: 1227 - DNA, 193 bp, Artificial Sequence
  Description of Artificial Sequence: Synthetic polynucleotide
ttttggggtttttgcgtttcgggggcgtggtaggttcggttttggtttaggtgcgagtgcgggagttgcgtaagggcgaagcggagcggggcggcgcgggcggtggcgggaagttttttttattttgcgtttgggatgggcgcgcgtggtattattacggcgtcgtcggcggttttttgttgcgcgttcgttt

SEQ ID NO: 1228 - DNA, 210 bp, Artificial Sequence
  Description of Artificial Sequence: Synthetic polynucleotide
tcgtggttattatttcgttttattttcgtttttttgggtcgtcgtattcgtttacgtgttcgtttttttttgcgtaaaattttaagatgagtaaatattgggtttacggtggagcgtcgcgggggtttttttgagtcggggcgggtcgggggcgggattagggttcggtcggggcgtgttcgaggggagggatttttcggtttgcgattt

SEQ ID NO: 1229 - DNA, 192 bp, Artificial Sequence
  Description of Artificial Sequence: Synthetic polynucleotide
taaagttttattatatttttgggtcgggcggtaggagtggggacgggagtggaggttttgcggagtagcggttcggggagttgtgggttgcgggttgggcggggcggcgcgatgcggggcgggcggtttagtttcgttttttttatcggcgtttttaggggatgaatgttttttttgacggtttttttattt

SEQ ID NO: 1230 - DNA, 186 bp, Artificial Sequence
  Description of Artificial Sequence: Synthetic polynucleotide
gttttttaatttggtttgttgaacgtaaatcgttgagagtttgttgtatcgttttttggggtttttggttgtcgagtttcgttaaggtaaagacgttagtaagcgaggaagcgtagcggaagaaaaataagcgggcgcgcgaggggagttttaggagggttgtcgagtggttggtaggcggttttt

SEQ ID NO: 1231 - DNA, 155 bp, Artificial Sequence
  Description of Artificial Sequence: Synthetic polynucleotide
gggaagtgcgggtggttgttcgggtttttagaggtcgtattatttattgtgttttaggttcgtaggaagttagattttgcgagaggtgtgtgggggcggagagtggtataggtttgatattgtaggtcggaggaggaagatagtggttgtaaagg

SEQ ID NO: 1232 - DNA, 255 bp, Artificial Sequence
  Description of Artificial Sequence: Synthetic polynucleotide
gtgtgtatgtgtgagggtgtgacggaggcgtttacgtgttcggttcgttcgtgttacggtcgtttatcggttgtagaggagaagggtaggttgtgggcggcggcggggcgcggaggggtagttaggagcgtaggttgggtttcgtatttttttgttttaaaatttattgatgtagcggttattgcggttgtcgagcggcgtttttttagagttcggggttgtgttcgttcgatgtaggatgtaattgaggaagtt

SEQ ID NO: 1233 - DNA, 220 bp, Artificial Sequence
  Description of Artificial Sequence: Synthetic polynucleotide
ttttttgggcgtttttagcgaatgcgagcggcgaggcgagggcgagcgcgtcgaggaagggcgggagaggcgcggagtttggtcgcgtcgcgttgcgtcgagcgtcgggtttttttcgcgagtttttcgggttcgcgcgcgcgttttttattgttttcgtttttcgcgcggcgcgtgttttttatttttcgtcgcgcgttttcgtattcgttcggtttta

SEQ ID NO: 1234 - DNA, 200 bp, Artificial Sequence
  Description of Artificial Sequence: Synthetic polynucleotide
gagacgaagagaggcggtgagaacgcgggtgtttagggattttattttcggttttcgttgggggttcgcgagcggttcggggacgtttgggttggggaagcggggttgttatttttagggcgggaggtagagacgatttagtttttggtttcgtttttttcgcgacgcgattttcgaggggttttgggtcgcgtttgtag

SEQ ID NO: 1235 - DNA, 185 bp, Artificial Sequence
  Description of Artificial Sequence: Synthetic polynucleotide
tttggataaagtttttaagatgtttttgtcgcggaggtcgaggattcgttcgttcgtgggtgagttgggaggggcgcggcgagggagggtgggttcggggcgggggcggcgcggggcgcgtttgcggttatgcgatattgtttcgttcgcgtttcgtttttttttttgggttttttgggtttttt

SEQ ID NO: 1236 - DNA, 198 bp, Artificial Sequence
  Description of Artificial Sequence: Synthetic polynucleotide
agtcgtaggtggagatattttagttgtgttttcggggatttcgtttggtcgttgcgttttgcgtttcgtagtcgttagagtcgttttatttcgcgacgtttgggttgggcgttttaaagtcgttacggttttcgttttttttaggttagtaaggcgcgcgtttttttcgttagtcgttatggtggtttgggaaaggtt

SEQ ID NO: 1237 - DNA, 216 bp, Artificial Sequence
  Description of Artificial Sequence: Synthetic polynucleotide
agtttaattaaggatcgtttagaggggtttttattttgaatttcggtttttttaaaggaagggtagattttagatttttttttttttttttcgaacgtgttttgggtgtttttttgtttttttttttggtaagttaggatagcgtatagtgtacggagtttcgaagtttttttagttattttcggatttttggttaaatttgagggtgagttcgaa

SEQ ID NO: 1238 - DNA, 194 bp, Artificial Sequence
  Description of Artificial Sequence: Synthetic polynucleotide
gcggagtttcggggaagagttttaaaggcgcgcgttttttcgtgtttcgcgtattcgaacgggagtcgcggagagttcgtttttcgttgtcgtcggcgtttcggggaggtaagtgttattcgcggatttcgagtcgcggtcgggtgggggcggttcgcggttgtttcgcgttcgggaagttttggttggggttg

SEQ ID NO: 1239 - DNA, 214 bp, Artificial Sequence
  Description of Artificial Sequence: Synthetic polynucleotide
ttcgggggttttttttttgttacgtcgttggggttcgttcgttatttatagttttcgtagagtttttcgggtatatcgcggttggtcgttcggggttaaggatggggcgggagcgtttatttattttcgcgtcggtcggggtatttaagaggcgcgttcgtagttatacggcgtttcgtttttcgtttcgaaaaagtttttgtttttttggcgt

SEQ ID NO: 1240 - DNA, 201 bp, Artificial Sequence
  Description of Artificial Sequence: Synthetic polynucleotide
ttggtttcgtttgtttattacggcgcgtttaaatttacgcggttcgcggttttttgcgtgttttgtcgatttcgggtcgtaggaggggttagtttcgtcggtttttacgcggggtttgcgtcggtagcgttacgggttggaacgcgtttcgggagaaattattcgcgcggggtcgcggcgttttttgttttaattttcgta

SEQ ID NO: 1241 - DNA, 108 bp, Artificial Sequence
  Description of Artificial Sequence: Synthetic polynucleotide
gttcgggaggcgggaagtgggtagtagcgttttcgtttggtttttgtgcgtttcgattcgacgttttttcgttcgattaggtgtttcgagagcgtatagttgggaggg

SEQ ID NO: 1242 - DNA, 191 bp, Artificial Sequence
  Description of Artificial Sequence: Synthetic polynucleotide
ggattgggatttgtttttggggaattcgtttagaagacggcggcggattggggtcgggtattttttagggttgttaggttttttttagttttgtatttgtcgcgtcgttttatttcgttaggaagttttagagatttcggggatggggtgggagcgtttttttatcgcgggtttaaaaagaaggaaggacg

SEQ ID NO: 1243 - DNA, 212 bp, Artificial Sequence
  Description of Artificial Sequence: Synthetic polynucleotide
ggatgaggttggttaggtgttcgcgttcgggcgtcgataggtatcgttgttgtcgaaagcgtcgttttagttcgtaggtttgcgttttggagaaaagtattcgtcgttttcgttttttgtcggcgtttttttcgtcgttcggggtttttttgttattgttcggtgattcgtcggtcgagggtttcggggatttggagtttgagttttgaggg

SEQ ID NO: 1244 - DNA, 165 bp, Artificial Sequence
  Description of Artificial Sequence: Synthetic polynucleotide
cgtatttgtcgggttattttgtttcggaggtaagtttagatttttcggtcgcgggggcgggcggaggggttcgtagtgggcggggtcgcggtaggggtcgcgagttggcggcgggagttggaggttgttttgcgttggcgggtgttttagttttggtttcgtttt

SEQ ID NO: 1245 - DNA, 241 bp, Artificial Sequence
  Description of Artificial Sequence: Synthetic polynucleotide
agtttggagagaagttatttcgggattttttattttttcgttttttttttcggttttgttcgagtttaggaggcggcgttggcgtgcgttattttcgttttagttaaggttttttgttcgttcgcgtattcgttcgtcgttcgcggttcgcgcgttttttttttttttcgtttaagttaaataggttaaggttggggtcgcggtagggatagggttcggggtagtttgggattagggacgt

SEQ ID NO: 1246 - DNA, 206 bp, Artificial Sequence
  Description of Artificial Sequence: Synthetic polynucleotide
tttagcgtgtttgggaggtaaattcgttgattagtttttgagaggagtggttagaggaatttaggcggggaaggggacggtggattttaggagagtgtaatttataaaggcggggggcggggacgtttaggttcgagttttaggattttgcgtcggacgtttcgttcgtttttttaggttttttgttcggttttcgtattcgcgcg

SEQ ID NO: 1247 - DNA, 167 bp, Artificial Sequence
  Description of Artificial Sequence: Synthetic polynucleotide
ttgtttaatttttagggttttttatgttttttttgcgtttcgacgtgcgagaatattgtttttggtagtgtagggcgtttttatttattatttttttcggttgggttcggttagtagggagggtcgttttgtgcgcgcgttttttttttattttttagggcggcgta

SEQ ID NO: 1248 - DNA, 155 bp, Artificial Sequence
  Description of Artificial Sequence: Synthetic polynucleotide
ttttatgtcgttgtttagtttgcgtttttcgaatttttcgggtatagttcgttgtattggagttttaggagatatcgttcgtagtagcgtacggagcgagggatttttagttcgggtcgggagagtaaagtttcgttggtttgttttggattgtt

SEQ ID NO: 1249 - DNA, 160 bp, Artificial Sequence
  Description of Artificial Sequence: Synthetic polynucleotide
ttttggttttttttttttagattcggatattgaagtaggcggtagcgggtgtttttttatttggttattttttcggcgtttagcgcgaggtagggtgggcgaggcgagggcggcgttttgcgagggagggcggtcgtagaatttgcgggtttttagcgtt

SEQ ID NO: 1250 - DNA, 190 bp, Artificial Sequence
  Description of Artificial Sequence: Synthetic polynucleotide
gggtcggagtcgtttgagtcggcgggagcgggtatttttgcgcgtcgcgttcggtttcgttttcgcgtttttcgcgcgttcgtcgcggtttttttttcgcgttcgttcgttcgtcgggttttcgtcgtcgtttcggggtgtagtcgagcggtcgcgtcgggttttcgggacggggtggaagtgggggtgg

SEQ ID NO: 1251 - DNA, 142 bp, Artificial Sequence
  Description of Artificial Sequence: Synthetic polynucleotide
gagagagttgttagggcggttttttcgtttcgggtttgttgggcggggtcggttaaggtgcgcgtgttcgttggttttaacggttttgttgggcgtttttgttgagaggcgggaggggttgagagtttgtgcgaaggtaggt

SEQ ID NO: 1252 - DNA, 179 bp, Artificial Sequence
  Description of Artificial Sequence: Synthetic polynucleotide
gatgcgttgttgttgggaattggtcggcgggagcgcggttttagttttcgttagtagttacgcgcgtttgggggcggcgcgttgcgagcggttgagatcgcgggcgggggcgggcgtttggtttgggtagcgtttttagcgcggtgtgggcggcgagtttcgtagggttgtaatcgttt

SEQ ID NO: 1253 - DNA, 178 bp, Artificial Sequence
  Description of Artificial Sequence: Synthetic polynucleotide
agttagagggtttgcggtggtcgagggagggattttacgacggggagttcgttcggtgtcgttttttttttttttttcgttttttcgttttttttatttcgtttttttcgtcgatttcgggagcgacgggcgttcgtgatttgcgaacgttgttaagtgacggttttcgagtttgaag

SEQ ID NO: 1254 - DNA, 123 bp, Artificial Sequence
  Description of Artificial Sequence: Synthetic polynucleotide
ttggagtaaggacggtaaggagttacgtgacggttttaagtatcgttacgttttcgaggattttgacgtggtggtattggtggtgcgcgacggcgagttggtagatttgggttagtatagtat

SEQ ID NO: 1255 - DNA, 193 bp, Artificial Sequence
  Description of Artificial Sequence: Synthetic polynucleotide
gttgggagtggggatattggatcggaggggattttttacgggagtattcgttgtttttattcgtttcggaacgcggttggattcggagttttcgatcgtagttcgcgtacgattttcgggagtttgttttcgcggtcgtcgatttacgttcgcgttgtcgttttattgttaggtggttcgagagatgtaggag

SEQ ID NO: 1256 - DNA, 188 bp, Artificial Sequence
  Description of Artificial Sequence: Synthetic polynucleotide
gaatggtaggttttatttaaagagtgtttggtggcgcgcggtgttttttttggagtagttttcggcgttcgttcgtcggggtttcggcgatcgttgttttttttttttttttttttttttttttttttttttcgtttttttttttcgtcgtttcgttatcgtcgcggttagggttggaggcgtcgttg

SEQ ID NO: 1257 - DNA, 206 bp, Artificial Sequence
  Description of Artificial Sequence: Synthetic polynucleotide
tgtttagagttcggatttagtagttcggtttcgcgttttttttgtttcgcggttcgtaggtttagtttttaagcgtttagttttcgcggtttttgtggcgttatagttagtttgaagaatggttgttttggagacgtaaatttaagagttttgtttttggagttgagaattgtagcgcggaggtttcggagcgagtcggggtagtt

SEQ ID NO: 1258 - DNA, 168 bp, Artificial Sequence
  Description of Artificial Sequence: Synthetic polynucleotide
ggatttgttggatattttggagaatggtcgtggggaggcgttaggaggcggcgggggttttttgggttcgggggtcgggtcgtcgtttttgttgttgggtagcgttttcgatatgaaggttgagttgtcgtaatttattagcgatttgggcgagtttagtttcggtaa

SEQ ID NO: 1259 - DNA, 242 bp, Artificial Sequence
  Description of Artificial Sequence: Synthetic polynucleotide
cgtttattgcgtgttgttttcgttcgtttttttttttttcgttttttttttttttttttttgttttcgcgtcgtttcgcgtttttcgttcgttgtagtcggcgaggagcgtcgtacgttggtttcggcgcgaggagttttcgggttttcgggcgggtattggagtaaggagttgcgagcgtagttcgaggcggggtacggcggaaggcgcggcgagagcggggtttttgcgagcgtagtcgg

SEQ ID NO: 1260 - DNA, 183 bp, Artificial Sequence
  Description of Artificial Sequence: Synthetic polynucleotide
ttattatttattacgattaggtttttatcgattgttagggcggcgattttttgaaggtgaggcgtttacggttagttaatttagtcggagggcggtacgggagggttggaaagggttggggcgttgtatttagcgtggggttgttgagcgtaggtagttagtggtattttttagatatttcgt

SEQ ID NO: 1261 - DNA, 197 bp, Artificial Sequence
  Description of Artificial Sequence: Synthetic polynucleotide
ggtttagaggtttttggttggcgggcgtttcgtcggtcgtcggttttttttttgaaattcgtcggcgtatatgaggtcgttgttttcgtcgtaggcgttggcggttttttcgcggtgttcgtggtgatgttatgtttcgttattacgcgggaggagaggagggcggcgtcgtcgggttttgggtgaagagcggcgta

SEQ ID NO: 1262 - DNA, 181 bp, Artificial Sequence
  Description of Artificial Sequence: Synthetic polynucleotide
ggattcggtgaattttttttgtagcgaaagtaatttagatggacgcgggaattgacgtatcggtatagaggattagcgcgtttttaagtcgattttcgggtcggtttttcgttgttttttcgtaatttttttttttttaggattttttcgtcggagttttggtttatcgtgattttggggt

SEQ ID NO: 1263 - DNA, 228 bp, Artificial Sequence
  Description of Artificial Sequence: Synthetic polynucleotide
gatttttacgttatttttgtagtttcgcgtttttttttttagttttggtcgggttttcgcgttttttcgattttcgatcgtaaagtcggggtgcgagagggaaagggaagtgaggcggtacgcgtatggagggtgtgagtgcggatatatatatagggtggttaggtacgaaaaatttcgttttttttcgaattttcgtttcggattagttgtagttttattatttta

SEQ ID NO: 1264 - DNA, 153 bp, Artificial Sequence
  Description of Artificial Sequence: Synthetic polynucleotide
tagttgggtatgtttggggagattacgatgttcggggagatcgcgatgttcggggagatagcgatgttcgggggtatcgcgatgttcggggagatcgcgacgttcggagggatcgcgacgttcggggagatcgcgatgttcgtttagggagat

SEQ ID NO: 1265 - DNA, 163 bp, Artificial Sequence
  Description of Artificial Sequence: Synthetic polynucleotide
ggtatttgtagaatgtcggcgggtcggtttcgcgtatcgtgtagtcgttgggttcgttttttaggtagtagggtatttgttggtcgtggggttgtaggaaaggcgatagttgcggcggcgggtgtagtagtattagcgggttcggagatacgttgttgagtgg

SEQ ID NO: 1266 - DNA, 191 bp, Artificial Sequence
  Description of Artificial Sequence: Synthetic polynucleotide
tttggtcgtttagggtcgggttttggttcgtcgtttacggtgcggagggttggtgggttttttttggtcgtcgggttcgttacggcgcgggttttggttgcggggcggaggtggggcgggagagtcgaggataagagtttgaggtttttcgaggcgcgtgtcgcggcgttcgtttttgcgggattttgcgt

SEQ ID NO: 1267 - DNA, 146 bp, Artificial Sequence
  Description of Artificial Sequence: Synthetic polynucleotide
ggtttatttcgtagtttttcgtaacgcgttaatttggacgttagcggcgcggggtttcggtcgggtagggggcgttcggtatcggcgggtttatttcggttcgttcgttcgtcgtaagttcggttcggtattttttttgtgcgttt

SEQ ID NO: 1268 - DNA, 160 bp, Artificial Sequence
  Description of Artificial Sequence: Synthetic polynucleotide
ttttgttacgtgttgttcgtagttttcgttcgtttttttcgcgttggtaacgggtattgattgttcgatattttagcgatcgtagagatttttttaatgtcgggcgtattatcggcgggttagcggtttcgttggtttttttgatatattttttatagtt

SEQ ID NO: 1269 - DNA, 160 bp, Artificial Sequence
  Description of Artificial Sequence: Synthetic polynucleotide
ttttagggtttattagggaattaggaattttttcgttttttttttttcgttttttgttttcgcgtttggcgtttgttcgggggatgtttaggcgcgggtatttatcgttcggtcgggggcgttttgggttgttggttgtagtgtgaagatttagtagtag

SEQ ID NO: 1270 - DNA, 180 bp, Artificial Sequence
  Description of Artificial Sequence: Synthetic polynucleotide
ttatttagtacggttagtttgttgtcggtttcgaaagttaggacgttggttttagagtatagttcggggatttttcgtaaaaattagatttaagtcgttcgcgttcgcgttttagtagttcgcgtttatcgagtattaggagtcgcgtgtttggttcgaagtattgggttttttggttat

SEQ ID NO: 1271 - DNA, 153 bp, Artificial Sequence
  Description of Artificial Sequence: Synthetic polynucleotide
ggttagattaaagtagaattttgggtgtgcgcgtgattttttagggagggcggattcggggttttttttgtcgtattttttattgggggatcgtttttaagttttcgagagtttttcgggtagagtttttagggtttagagtatgggaggatt

SEQ ID NO: 1272 - DNA, 222 bp, Artificial Sequence
  Description of Artificial Sequence: Synthetic polynucleotide
gggagcgtcggggatgggggacgggcggggttggagcggggatttatttttttttttgttttaagaggatttaaaggaaaataatttatttgattttggatacgtttttatttataattcggaaatatgtaaatgaaaggtttatatggtttgaaaggggtaaattaagtttttagcgtgcggcgcggggaatcggtttttttttagggagtttcggaggcg

SEQ ID NO: 1273 - DNA, 156 bp, Artificial Sequence
  Description of Artificial Sequence: Synthetic polynucleotide
gtagatattttaaattttttatacgtcgtttttagcgaggcgtttcggggaaagtagcgtgaggtagtgagtcgaggggcggggttaggaggacgtttcgttttcgagttcgtttcgtcggagggtttgattaatgattttttaagtcgttttagt

SEQ ID NO: 1274 - DNA, 141 bp, Artificial Sequence
  Description of Artificial Sequence: Synthetic polynucleotide
ttttttggtttcgggttggtttttgaggggcgtaaacggtaggtttggcggttggggtcgaggagggagggtattatcgtttcgaggtagtacgtagtttgtagtagaggcgtttgttttaagttgttttttgggggcgtt

SEQ ID NO: 1275 - DNA, 167 bp, Artificial Sequence
  Description of Artificial Sequence: Synthetic polynucleotide
gattttcggtgtatatttggggattgggggttttttaggtggcgtttttttattttttgcgggtttttttcgtagttttaaatattttaaacggcgcgcgtatttttcgtttggtttatttatcgatttcgtcgatacgtaggttattaagtttaaggtgagtagga

SEQ ID NO: 1276 - DNA, 141 bp, Artificial Sequence
  Description of Artificial Sequence: Synthetic polynucleotide
ggtaggcgagcgggattgattcggcgggttgcgtatatttttttttaaggtttcgattgtgcgcggacgggggcgcgtttaggaattttcgttttttttttcgtttgtttgattttgttgggtatttaaagtcggattcgg

SEQ ID NO: 1277 - DNA, 193 bp, Artificial Sequence
  Description of Artificial Sequence: Synthetic polynucleotide
gggcgaacgcgtagtaggaagtcgtcggcggcgtcgtggtggtgttacgcgcgtttattttaggcgtagagtgaaaagagtttttcgttatcgttcgcgtcgtttcgtttcgtttcgtttttgcgtagttttcgtattcgtatttggattagggtcgagtttgttacgttttcgggacgtaagggttttagga

SEQ ID NO: 1278 - DNA, 210 bp, Artificial Sequence
  Description of Artificial Sequence: Synthetic polynucleotide
gggtcgtaagtcggggagttttttttttcgggtacgtttcggtcggattttggtttcgttttcgattcgtttcggtttaggggggttttcgcggcgttttatcgtgagtttagtatttgtttattttggaattttgcgtagggagagacgggtacgtggacgaatgcggcggtttaaagagacgggaatgaagcgaggtggtggttacgg

SEQ ID NO: 1279 - DNA, 192 bp, Artificial Sequence
  Description of Artificial Sequence: Synthetic polynucleotide
aagtaaagagatcgttaggagggatatttattttttgagggcgtcggtagggggagcggggttgagtcgttcgtttcgtatcgcgtcgtttcgtttagttcgtagtttatagtttttcgagtcgttgtttcgtaagatttttattttcgtttttatttttgtcgttcggtttagaagtgtggtgggattttg

SEQ ID NO: 1280 - DNA, 186 bp, Artificial Sequence
  Description of Artificial Sequence: Synthetic polynucleotide
gggagtcgtttgttagttattcggtagtttttttggggtttttttcgcgcgttcgtttgtttttttttcgttgcgttttttcgtttgttggcgtttttgttttagcgggattcggtagttaggggttttagggggcggtgtagtaaatttttagcggtttgcgtttagtagattaggttggggagt

SEQ ID NO: 1281 - DNA, 155 bp, Artificial Sequence
  Description of Artificial Sequence: Synthetic polynucleotide
tttttgtagttattgtttttttttttcgatttgtagtgttaaatttgtgttatttttcgtttttatatatttttcgtaaggtttggttttttgcgagtttggaatataataggtggtgcggtttttgagggttcgggtagttattcgtatttttt

SEQ ID NO: 1282 - DNA, 255 bp, Artificial Sequence
  Description of Artificial Sequence: Synthetic polynucleotide
ggtttttttagttgtattttgtatcgggcgggtatagtttcgggttttgggaagacgtcgttcggtagtcgtagtggtcgttgtattaatgggttttggggtagggaggtgcggagtttagtttgcgtttttggttattttttcgcgtttcgtcgtcgtttatagtttattttttttttttgtagtcggtaggcggtcgtaatacgggcgggtcgagtacgtgggcgttttcgttatatttttatatatatatat

SEQ ID NO: 1283 - DNA, 220 bp, Artificial Sequence
  Description of Artificial Sequence: Synthetic polynucleotide
tggagtcgggcgggtgcgagggcgcgcggcggggggtggggggtacgcgtcgcgcggggggcgggggtagtggggggcgcgcgcgcgggttcggggagttcgcggggagagttcggcgttcggcgtagcgcggcgcggttaagtttcgcgtttttttcgttttttttcggcgcgttcgttttcgtttcgtcgttcgtattcgttgggggcgtttagaaag

SEQ ID NO: 1284 - DNA, 200 bp, Artificial Sequence
  Description of Artificial Sequence: Synthetic polynucleotide
ttgtaggcgcggtttagggtttttcgggggtcgcgtcgcggagggggcgaagttaggagttggatcgtttttgtttttcgttttgggggtaatagtttcgtttttttagtttagacgttttcgagtcgttcgcgggtttttagcgggagtcgggggtggggtttttaagtattcgcgtttttatcgttttttttcgtttt

SEQ ID NO: 1285 - DNA, 185 bp, Artificial Sequence
  Description of Artificial Sequence: Synthetic polynucleotide
agagagtttagggagtttagggaggggagcggggcgcgggcggggtagtgtcgtataatcgtaggcgcgtttcgcgtcgttttcgtttcgggtttattttttttcgtcgcgttttttttagtttatttacggacgagcggattttcgattttcgcggtagggatattttaagagttttgtttagg

SEQ ID NO: 1286 - DNA, 198 bp, Artificial Sequence
  Description of Artificial Sequence: Synthetic polynucleotide
ggttttttttaggttattatagcggttggcggagggagcgcgcgttttgttggtttggagggggcgggggtcgtggcggttttaaagcgtttagtttaggcgtcgcggggtggggcggttttggcggttgcggggcgtagggcgtagcggttaagcggggttttcggaagtatagttggggtgtttttatttacgatt

SEQ ID NO: 1287 - DNA, 216 bp, Artificial Sequence
  Description of Artificial Sequence: Synthetic polynucleotide
ttcgggtttatttttaggtttaattagaaattcgggagtagttgagagagtttcggagtttcgtgtattgtgcgttgttttgatttgttaaaaaagaaagtagaaaaatatttaaagtacgttcgagaagagaagggggaaatttggggtttgttttttttttagaaaagtcgaggtttagggtgagagtttttttgagcggtttttggttgagtt

SEQ ID NO: 1288 - DNA, 194 bp, Artificial Sequence
  Description of Artificial Sequence: Synthetic polynucleotide
tagttttagttagagtttttcgagcgcggggtagtcgcgggtcgtttttattcggtcgcgattcgggattcgcgggtggtatttattttttcgaggcgtcggcggtagcgggaggcgagtttttcgcggttttcgttcgagtgcgcggggtacggaggagcgcgcgtttttaagattttttttcgagatttcgt

SEQ ID NO: 1289 - DNA, 214 bp, Artificial Sequence
  Description of Artificial Sequence: Synthetic polynucleotide
gcgttaggggagtaggagttttttcggagcgggaggcggggcgtcgtgtggttgcgagcgcgttttttggatgtttcggtcggcgcgggggtgggtgggcgttttcgttttatttttggtttcgggcggttagtcgcggtgtgttcggagggttttgcgagggttgtgggtggcgggcgagttttagcggcgtagtagaggaggggttttcgag

SEQ ID NO: 1290 - DNA, 201 bp, Artificial Sequence
  Description of Artificial Sequence: Synthetic polynucleotide
tacgggagttggggtagaagacgtcgcgatttcgcgcgggtaatttttttcgaggcgcgttttagttcgtggcgttgtcggcgtagatttcgcgtggggatcggcgaggttaattttttttgcggttcggggtcggtagagtacgtaaggggtcgcgggtcgcgtgggtttgggcgcgtcgtggtgggtaagcggggttag

SEQ ID NO: 1291 - DNA, 108 bp, Artificial Sequence
  Description of Artificial Sequence: Synthetic polynucleotide
tttttttagttgtgcgttttcgaggtatttggtcgggcggggaggcgtcgggtcggggcgtataggggttaggcgggggcgttgttgtttatttttcgtttttcgggt

SEQ ID NO: 1292 - DNA, 191 bp, Artificial Sequence
  Description of Artificial Sequence: Synthetic polynucleotide
cgtttttttttttttttgagttcgcgatgggaaggcgtttttattttattttcggggtttttgagattttttggcgaggtggggcggcgcggtaggtgtagggttggggagggtttgatagttttggagagtgttcgattttagttcgtcgtcgttttttaggcggattttttagaggtaggttttagttt

SEQ ID NO: 1293 - DNA, 212 bp, Artificial Sequence
  Description of Artificial Sequence: Synthetic polynucleotide
tttttaggatttaagttttaagttttcggagttttcggtcgacgagttatcggataatgataaggagatttcgggcggcgggggggacgtcggtaagaagcgaaagcggcgagtgtttttttttaaggcgtagatttacgagttggagcggcgttttcggtagtagcggtatttgtcggcgttcgagcgcgaatatttggttagttttattt

SEQ ID NO: 1294 - DNA, 165 bp, Artificial Sequence
  Description of Artificial Sequence: Synthetic polynucleotide
gaggcggagttaggattaggatattcgttagcgtagggtagtttttagttttcgtcgttagttcgcggtttttgtcgcgatttcgtttattgcgggttttttcgttcgttttcgcggtcgggaggtttggatttattttcgggataaggtgattcggtaagtgcg

SEQ ID NO: 1295 - DNA, 241 bp, Artificial Sequence
  Description of Artificial Sequence: Synthetic polynucleotide
acgtttttagttttagattatttcggattttgtttttgtcgcggttttagttttgatttgtttgatttgagcgagagggaggaagggcgcgcgggtcgcgggcgacgggcgggtgcgcgggcgggtaggggattttggttaaggcgagagtagcgtacgttagcgtcgttttttagattcgagtagagtcggagagagagacgagagggtgggaggtttcggagtaatttttttttaggtt

SEQ ID NO: 1296 - DNA, 206 bp, Artificial Sequence
  Description of Artificial Sequence: Synthetic polynucleotide
cgcgcgggtacgaggatcgggtaggggatttgaaagggcgggcgaagcgttcggcgtagagttttgggattcggatttgggcgttttcgtttttcgtttttgtaaattatatttttttggagtttatcgttttttttttcgtttggatttttttagttattttttttaagagttagttaacgagtttgttttttaaatacgttgga

SEQ ID NO: 1297 - DNA, 167 bp, Artificial Sequence
  Description of Artificial Sequence: Synthetic polynucleotide
tgcgtcgttttgggaagtgaagagggagcgcgcgtatagggcggttttttttgttggtcgggtttagtcgaggggagtaataagtgggggcgttttgtattgttaagggtagtgttttcgtacgtcggggcgtagagggggtatgaagaattttggaaattgggtag

SEQ ID NO: 1298 - DNA, 155 bp, Artificial Sequence
  Description of Artificial Sequence: Synthetic polynucleotide
aataatttagagtaggttaacgaggttttgttttttcgattcgaattaaaggtttttcgtttcgtgcgttgttacgagcggtgttttttggggttttaatgtagcgagttgtgttcgaggggttcggaaggcgtaagttgggtagcgatatgggg

SEQ ID NO: 1299 - DNA, 160 bp, Artificial Sequence
  Description of Artificial Sequence: Synthetic polynucleotide
ggcgttgaaggttcgtaggttttgcgatcgttttttttcgtagggcgtcgttttcgtttcgtttattttgtttcgcgttaggcgtcgaaggggtagttaggtaggaagatattcgttatcgtttgttttagtgttcggatttaaagggaagaaattaagg

SEQ ID NO: 1300 - DNA, 190 bp, Artificial Sequence
  Description of Artificial Sequence: Synthetic polynucleotide
ttatttttatttttatttcgtttcggggattcggcgcggtcgttcggttgtatttcggggcggcggcgggggttcggcgagcggacgggcgcgggggagggatcgcggcgggcgcgcggggggcgcggaggcgaggtcgagcgcggcgcgtaggggtgttcgttttcgtcggtttaagcggtttcggttt

SEQ ID NO: 1301 - DNA, 142 bp, Artificial Sequence
  Description of Artificial Sequence: Synthetic polynucleotide
atttattttcgtatagatttttagtttttttcgttttttagtagaaacgtttaatagaatcgttaggattagcgagtacgcgtattttagtcggtttcgtttaataggttcgaggcggagaaatcgttttagtagttttttt

SEQ ID NO: 1302 - DNA, 179 bp, Artificial Sequence
  Description of Artificial Sequence: Synthetic polynucleotide
gaacgattgtagttttgcggggttcgtcgtttatatcgcgttgaggacgttgtttaagttaggcgttcgttttcgttcgcggttttagtcgttcgtagcgcgtcgtttttagacgcgcgtggttgttggcgagggttgagatcgcgttttcgtcggttagtttttagtagtagcgtatt

SEQ ID NO: 1303 - DNA, 178 bp, Artificial Sequence; identical to SEQ ID NO: 1253
  Description of Artificial Sequence: Synthetic polynucleotide

SEQ ID NO: 1304 - DNA, 123 bp, Artificial Sequence
  Description of Artificial Sequence: Synthetic polynucleotide
atgttgtattggtttaggtttgttagttcgtcgtcgcgtattattagtgttattacgttagggttttcgaagacgtagcggtatttgggatcgttacgtagttttttgtcgtttttattttag

SEQ ID NO: 1305 - DNA, 193 bp, Artificial Sequence
  Description of Artificial Sequence: Synthetic polynucleotide
tttttgtatttttcgggttatttggtagtggggcggtagcgcggacgtgggtcggcggtcgcggagataggttttcgggggtcgtgcgcgggttgcggtcggggatttcgggtttagtcgcgtttcgagacgagtgagggtagcgagtattttcgtgaagggtttttttcgatttagtgtttttatttttagt

SEQ ID NO: 1306 - DNA, 188 bp, Artificial Sequence
  Description of Artificial Sequence: Synthetic polynucleotide
tagcggcgtttttagttttagtcgcggcggtggcgaggcggcggggggaggaggcggaggagaaaaaagaggaggagaaggaggaggaggagtagcgatcgtcgagatttcggcgggcgggcgtcgagagttgttttaagaaggatatcgcgcgttattaggtattttttaaatggagtttattattt

SEQ ID NO: 1307 - DNA, 206 bp, Artificial Sequence
  Description of Artificial Sequence: Synthetic polynucleotide
gattgtttcggttcgtttcgaagttttcgcgttgtagtttttagttttaggagtagggtttttgggtttacgtttttaaggtaattattttttaggttggttgtgacgttataaaggtcgcggaggttgggcgtttgagggttgggtttgcgggtcgcgggatagggagggcgcggggtcgggttgttgggttcgagttttgggta

SEQ ID NO: 1308 - DNA, 168 bp, Artificial Sequence
  Description of Artificial Sequence: Synthetic polynucleotide
ttgtcgaagttgagttcgtttaggtcgttaataagttgcgatagtttagtttttatgtcggaggcgttgtttagtagtagaggcggcggttcggttttcgggtttagggagttttcgtcgttttttagcgtttttttacggttattttttagagtatttaataagttt

SEQ ID NO: 1309 - DNA, 242 bp, Artificial Sequence
  Description of Artificial Sequence: Synthetic polynucleotide
tcgattgcgttcgtagggatttcgttttcgtcgcgtttttcgtcgtgtttcgtttcgggttgcgttcgtagttttttattttagtgttcgttcgggaattcgggagtttttcgcgtcggggttaacgtgcggcgtttttcgtcggttatagcgggcgggagacgcgaggcggcgcgggagtaggggaaggaggggaaggagcgggggaggaggggacggacgaaggtagtacgtagtgggcg

SEQ ID NO: 1310 - DNA, 183 bp, Artificial Sequence
  Description of Artificial Sequence: Synthetic polynucleotide
gcgaagtgtttaagaagtgttattggttatttacgtttagtagttttacgttgggtgtagcgttttagttttttttaattttttcgtgtcgtttttcggttaggttggttggtcgtgggcgttttatttttaggaagtcgtcgttttgatagtcgatggagatttggtcgtagtggatggtaa

SEQ ID NO: 1311 - DNA, 197 bp, Artificial Sequence
  Description of Artificial Sequence: Synthetic polynucleotide
tgcgtcgttttttatttagagttcggcggcgtcgttttttttttttttcgcgtggtggcggggtatggtattattacgggtatcgcgagggggtcgttagcgtttgcggcgggggtagcggttttatgtgcgtcggcgggttttaaggaggaagtcggcggtcgacggggcgttcgttagttagagatttttgagtt

SEQ ID NO: 1312 - DNA, 181 bp, Artificial Sequence
  Description of Artificial Sequence: Synthetic polynucleotide
gttttaaggttacggtgagttagggtttcgacggggaggttttgggagggaggaggttgcgggagggtagcgaggggtcggttcgggagtcggtttgagggcgcgttgattttttgtgtcggtgcgttagttttcgcgtttatttgggttgttttcgttgtaggggagatttatcgagttt

SEQ ID NO: 1313 - DNA, 196 bp, Artificial Sequence
  Description of Artificial Sequence: Synthetic polynucleotide
ttaattgttttttttaagtataggtcgtcgcgtttttaattttttgtttttatttcggttcgttcgttttttttttcgttttttttcgattgtagcgggggtagcgttttggcgtttttaaggatttttcgttattttttttataaagtagcggcggtggcggcggttgttgttggatttttatattgtagttagt

SEQ ID NO: 1314 - DNA, 138 bp, Artificial Sequence
  Description of Artificial Sequence: Synthetic polynucleotide
ggtcgttgtgtcgttatttattcgagtcgttcgggttggtcgcgagtcgggattcgcgagggttggcgggttttggttttcgaggacgtagatatgtggtttgaattttcgtttttttagtcgttgtttttgtgtatt

SEQ ID NO: 1315 - DNA, 176 bp, Artificial Sequence
  Description of Artificial Sequence: Synthetic polynucleotide
gttttcgttagttagtagttcggcgaggcgttggtttatttatggttttcgggcggcggtttttgcgtttagttttgcgcgtagttttcgtttttcgttcggggtcgtcgagttttcgatacgggcgagatgttgaacggcgtaggtttggataaagtttttaagatgtttttgtt

SEQ ID NO: 1316 - DNA, 171 bp, Artificial Sequence
  Description of Artificial Sequence: Synthetic polynucleotide
ggaagttttggttggggttgcggtcggagggcggcgtttaagtttttttgaaggtttcggagggtagttggagcggcgtagagtttgcgcggggatggcgggggtggtcgcgggtcggggtcgtttgggggcggttatttcgggcggtgcgtggaaaagtaggtattggtg

SEQ ID NO: 1317 - DNA, 164 bp, Artificial Sequence
  Description of Artificial Sequence: Synthetic polynucleotide
tattttagtttttaagtttttttgagtcggggttgcgttttcgttgtttttttcggtcgtcgttttttggcgttagagggatttcgcggttcgtacgggtttgttttcggtttcgttcggagggtgtgcgggttttcgtttcgttggtttcgtttgtttattat

SEQ ID NO: 1318 - DNA, 171 bp, Artificial Sequence
  Description of Artificial Sequence: Synthetic polynucleotide
ggtcgcggaggatataataggtagagtcgggggtgttcggtcgcgcgtttttcgcgtattatgtagttttttgttatttttttcgtttttaggttaaaattttgagtatgatggaagataataagtagttcgcgtttcgtatcgatggggcggtttagtcggttagttagg

SEQ ID NO: 1319 - DNA, 135 bp, Artificial Sequence
  Description of Artificial Sequence: Synthetic polynucleotide
gtttgttgttaggcgatagtacgggtagcgagagttttatcgagggcgggggttttgacgttattttcgttatcgtcggggattcgtttcgttaggtcgacggcgttagtgtagacgagttttattcgggttgag

SEQ ID NO: 1320 - DNA, 196 bp, Artificial Sequence
  Description of Artificial Sequence: Synthetic polynucleotide
gttggttgtagtgtgaagatttagtagtagtcgtcgttatcgtcgttgttttgtggggagagtggcggggagtttttgggagcgttaaagcgttgttttcgttgtagtcgggagagggcggaggaggagacgggcgggtcggggtgaggatagggagttggggacgcggcgatttgtgtttgaggagggtagttag

SEQ ID NO: 1321 - DNA, 138 bp, Artificial Sequence
  Description of Artificial Sequence: Synthetic polynucleotide
gatgtatagaggtaacggttaggggagcggaggtttaagttatatgtttgcgttttcgggggttagagttcgttagttttcgcggatttcggttcgcggttagttcgagcggttcgggtgagtagcggtatagcggtt

SEQ ID NO: 1322 - DNA, 176 bp, Artificial Sequence
  Description of Artificial Sequence: Synthetic polynucleotide
ggtagggatattttaagagttttgtttaggtttgcgtcgtttagtatttcgttcgtgtcgggggttcggcggtttcgggcgagagacggaggttacgcgtagggttgggcgtaggggtcgtcgttcgaggattatgggtgggttagcgtttcgtcgggttgttagttggcggggat

SEQ ID NO: 1323 - DNA, 171 bp, Artificial Sequence
  Description of Artificial Sequence: Synthetic polynucleotide
tattagtgtttatttttttacgtatcgttcgggatggtcgtttttagacggtttcggttcgcggttattttcgttattttcgcgtaggttttacgtcgttttagttgtttttcgaggtttttaagaaaatttgggcgtcgtttttcgatcgtagttttagttagagttttt

SEQ ID NO: 1324 - DNA, 164 bp, Artificial Sequence
  Description of Artificial Sequence: Synthetic polynucleotide
gtggtgggtaagcggggttagcggagcgggaattcgtatatttttcgagcggagtcgaggataggttcgtgcgggtcgcggggtttttttggcgttaggaagcggcggtcgaaggagataacgagaacgtagtttcggtttagggaggtttaaaagttgagatg

SEQ ID NO: 1325 - DNA, 171 bp, Artificial Sequence
  Description of Artificial Sequence: Synthetic polynucleotide
tttggttggtcgattggatcgttttatcgatgcggagcgcgagttgtttattgttttttattatgtttaggattttggtttgggggcgagagaggtgataaagagttgtatgatgcgcggggggcgcgcggtcgggtattttcggttttatttgttgtgtttttcgcggtt

SEQ ID NO: 1326 - DNA, 135 bp, Artificial Sequence
  Description of Artificial Sequence: Synthetic polynucleotide
tttagttcgagtggggttcgtttgtattggcgtcgtcggtttggcgggacgagttttcggcggtggcggaggtggcgttagggttttcgttttcgatggagttttcgttgttcgtgttgtcgtttgatagtaggt

SEQ ID NO: 1327 - DNA, 41 bp, Homo sapiens; identical to SEQ ID NO: 40

SEQ ID NO: 1328 - DNA, 152 bp, Homo sapiens; identical to SEQ ID NO: 47

SEQ ID NO: 1329 - DNA, 30 bp, Homo sapiens; identical to SEQ ID NO: 1

SEQ ID NO: 1330 - DNA, 125 bp, Homo sapiens; identical to SEQ ID NO: 4

SEQ ID NO: 1331 - DNA, 64 bp, Homo sapiens; identical to SEQ ID NO: 13

SEQ ID NO: 1332 - DNA, 2 bp, Homo sapiens
cg

SEQ ID NO: 1333 - DNA, 6 bp, Homo sapiens
cgggcg

SEQ ID NO: 1334 - DNA, 112 bp, Homo sapiens; identical to SEQ ID NO: 22

SEQ ID NO: 1335 - DNA, 112 bp, Homo sapiens; identical to SEQ ID NO: 25

SEQ ID NO: 1336 - DNA, 124 bp, Homo sapiens; identical to SEQ ID NO: 26

SEQ ID NO: 1337 - DNA, 63 bp, Homo sapiens; identical to SEQ ID NO: 30

SEQ ID NO: 1338 - DNA, 10 bp, Homo sapiens
cgtccgctcg

SEQ ID NO: 1339 - DNA, 41 bp, Homo sapiens; identical to SEQ ID NO: 90

SEQ ID NO: 1340 - DNA, 152 bp, Homo sapiens; identical to SEQ ID NO: 97

SEQ ID NO: 1341 - DNA, 30 bp, Homo sapiens; identical to SEQ ID NO: 51

SEQ ID NO: 1342 - DNA, 125 bp, Homo sapiens; identical to SEQ ID NO: 54

SEQ ID NO: 1343 - DNA, 64 bp, Homo sapiens; identical to SEQ ID NO: 63

SEQ ID NO: 1344 - DNA, 2 bp, Homo sapiens
cg

SEQ ID NO: 1345 - DNA, 6 bp, Homo sapiens
cgcccg

SEQ ID NO: 1346 - DNA, 112 bp, Homo sapiens; identical to SEQ ID NO: 72

SEQ ID NO: 1347 - DNA, 112 bp, Homo sapiens; identical to SEQ ID NO: 75

SEQ ID NO: 1348 - DNA, 124 bp, Homo sapiens; identical to SEQ ID NO: 76

SEQ ID NO: 1349 - DNA, 63 bp, Homo sapiens; identical to SEQ ID NO: 80

SEQ ID NO: 1350 - DNA, 10 bp, Homo sapiens
cgagcggacg

SEQ ID NO: 1351 - DNA, 41 bp, Artificial Sequence; identical to SEQ ID NO: 140
  Description of Artificial Sequence: Synthetic oligonucleotide

SEQ ID NO: 1352 - DNA, 152 bp, Artificial Sequence; identical to SEQ ID NO: 147
  Description of Artificial Sequence: Synthetic polynucleotide

SEQ ID NO: 1353 - DNA, 30 bp, Artificial Sequence; identical to SEQ ID NO: 101
  Description of Artificial Sequence: Synthetic oligonucleotide

SEQ ID NO: 1354 - DNA, 125 bp, Artificial Sequence; identical to SEQ ID NO: 104
  Description of Artificial Sequence: Synthetic polynucleotide

SEQ ID NO: 1355 - DNA, 64 bp, Artificial Sequence; identical to SEQ ID NO: 113
  Description of Artificial Sequence: Synthetic oligonucleotide

SEQ ID NO: 1356 - DNA, 2 bp, Artificial Sequence
  Description of Artificial Sequence: Synthetic oligonucleotide
yg

SEQ ID NO: 1357 - DNA, 6 bp, Artificial Sequence
  Description of Artificial Sequence: Synthetic oligonucleotide
ygggyg

SEQ ID NO: 1358 - DNA, 112 bp, Artificial Sequence; identical to SEQ ID NO: 122
  Description of Artificial Sequence: Synthetic polynucleotide

SEQ ID NO: 1359 - DNA, 112 bp, Artificial Sequence; identical to SEQ ID NO: 125
  Description of Artificial Sequence: Synthetic polynucleotide

SEQ ID NO: 1360 - DNA, 124 bp, Artificial Sequence; identical to SEQ ID NO: 126
  Description of Artificial Sequence: Synthetic polynucleotide

SEQ ID NO: 1361 - DNA, 63 bp, Artificial Sequence; identical to SEQ ID NO: 130
  Description of Artificial Sequence: Synthetic oligonucleotide

SEQ ID NO: 1362 - DNA, 10 bp, Artificial Sequence
  Description of Artificial Sequence: Synthetic oligonucleotide
ygttygttyg

SEQ ID NO: 1363 - DNA, 41 bp, Artificial Sequence; identical to SEQ ID NO: 190
  Description of Artificial Sequence: Synthetic oligonucleotide

SEQ ID NO: 1364 - DNA, 152 bp, Artificial Sequence; identical to SEQ ID NO: 197
  Description of Artificial Sequence: Synthetic polynucleotide

SEQ ID NO: 1365 - DNA, 30 bp, Artificial Sequence; identical to SEQ ID NO: 151
  Description of Artificial Sequence: Synthetic oligonucleotide

SEQ ID NO: 1366 - DNA, 125 bp, Artificial Sequence; identical to SEQ ID NO: 154
  Description of Artificial Sequence: Synthetic polynucleotide

SEQ ID NO: 1367 - DNA, 64 bp, Artificial Sequence; identical to SEQ ID NO: 163
  Description of Artificial Sequence: Synthetic oligonucleotide

SEQ ID NO: 1368 - DNA, 2 bp, Artificial Sequence
  Description of Artificial Sequence: Synthetic oligonucleotide
yg

SEQ ID NO: 1369 - DNA, 6 bp, Artificial Sequence
  Description of Artificial Sequence: Synthetic oligonucleotide
ygttyg

SEQ ID NO: 1370 - DNA, 112 bp, Artificial Sequence; identical to SEQ ID NO: 172
  Description of Artificial Sequence: Synthetic polynucleotide

SEQ ID NO: 1371 - DNA, 112 bp, Artificial Sequence; identical to SEQ ID NO: 175
  Description of Artificial Sequence: Synthetic polynucleotide

SEQ ID NO: 1372 - DNA, 124 bp, Artificial Sequence; identical to SEQ ID NO: 176
  Description of Artificial Sequence: Synthetic polynucleotide

SEQ ID NO: 1373 - DNA, 63 bp, Artificial Sequence; identical to SEQ ID NO: 180
  Description of Artificial Sequence: Synthetic oligonucleotide

SEQ ID NO: 1374 - DNA, 10 bp, Artificial Sequence
  Description of Artificial Sequence: Synthetic oligonucleotide
ygagyggayg

SEQ ID NO: 1375 - DNA, 41 bp, Artificial Sequence; identical to SEQ ID NO: 240
  Description of Artificial Sequence: Synthetic oligonucleotide

SEQ ID NO: 1376 - DNA, 152 bp, Artificial Sequence; identical to SEQ ID NO: 247
  Description of Artificial Sequence: Synthetic polynucleotide

SEQ ID NO: 1377 - DNA, 30 bp, Artificial Sequence; identical to SEQ ID NO: 1
  Description of Artificial Sequence: Synthetic oligonucleotide

SEQ ID NO: 1378 - DNA, 125 bp, Artificial Sequence; identical to SEQ ID NO: 204
  Description of Artificial Sequence: Synthetic polynucleotide

SEQ ID NO: 1379 - DNA, 64 bp, Artificial Sequence; identical to SEQ ID NO: 213
  Description of Artificial Sequence: Synthetic oligonucleotide

SEQ ID NO: 1380 - DNA, 2 bp, Artificial Sequence
  Description of Artificial Sequence: Synthetic oligonucleotide
cg

SEQ ID NO: 1381 - DNA, 6 bp, Artificial Sequence
  Description of Artificial Sequence: Synthetic oligonucleotide
cgggcg

SEQ ID NO: 1382 - DNA, 112 bp, Artificial Sequence; identical to SEQ ID NO: 222
  Description of Artificial Sequence: Synthetic polynucleotide

SEQ ID NO: 1383 - DNA, 112 bp, Artificial Sequence; identical to SEQ ID NO: 225
  Description of Artificial Sequence: Synthetic polynucleotide

SEQ ID NO: 1384 - DNA, 124 bp, Artificial Sequence; identical to SEQ ID NO: 226
  Description of Artificial Sequence: Synthetic polynucleotide

SEQ ID NO: 1385 - DNA, 63 bp, Artificial Sequence; identical to SEQ ID NO: 230
  Description of Artificial Sequence: Synthetic oligonucleotide

SEQ ID NO: 1386 - DNA, 10 bp, Artificial Sequence
  Description of Artificial Sequence: Synthetic oligonucleotide
cgttcgttcg

SEQ ID NO: 1387 - DNA, 41 bp, Artificial Sequence; identical to SEQ ID NO: 290
  Description of Artificial Sequence: Synthetic oligonucleotide

SEQ ID NO: 1388 - DNA, 152 bp, Artificial Sequence; identical to SEQ ID NO: 297
  Description of Artificial Sequence: Synthetic polynucleotide

SEQ ID NO: 1389 - DNA, 30 bp, Artificial Sequence; identical to SEQ ID NO: 251
  Description of Artificial Sequence: Synthetic oligonucleotide

SEQ ID NO: 1390 - DNA, 125 bp, Artificial Sequence; identical to SEQ ID NO: 254
  Description of Artificial Sequence: Synthetic polynucleotide

SEQ ID NO: 1391 - DNA, 64 bp, Artificial Sequence; identical to SEQ ID NO: 263
  Description of Artificial Sequence: Synthetic oligonucleotide

SEQ ID NO: 1392 - DNA, 2 bp, Artificial Sequence
  Description of Artificial Sequence: Synthetic oligonucleotide
cg

SEQ ID NO: 1393 - DNA, 6 bp, Artificial Sequence
  Description of Artificial Sequence: Synthetic oligonucleotide
cgttcg

SEQ ID NO: 1394 - DNA, 112 bp, Artificial Sequence; identical to SEQ ID NO: 272
  Description of Artificial Sequence: Synthetic polynucleotide

SEQ ID NO: 1395 - DNA, 112 bp, Artificial Sequence; identical to SEQ ID NO: 275
  Description of Artificial Sequence: Synthetic polynucleotide

SEQ ID NO: 1396 - DNA, 124 bp, Artificial Sequence; identical to SEQ ID NO: 276
  Description of Artificial Sequence: Synthetic polynucleotide

SEQ ID NO: 1397 - DNA, 63 bp, Artificial Sequence; identical to SEQ ID NO: 280
  Description of Artificial Sequence: Synthetic oligonucleotide

SEQ ID NO: 1398 - DNA, 10 bp, Artificial Sequence
  Description of Artificial Sequence: Synthetic oligonucleotide
cgagcggacg

SEQ ID NO: 1399 - DNA, 363 bp, Homo sapiens; identical to SEQ ID NO: 340

SEQ ID NO: 1400 - DNA, 509 bp, Homo sapiens; identical to SEQ ID NO: 347

SEQ ID NO: 1401 - DNA, 424 bp, Homo sapiens; identical to SEQ ID NO: 301

SEQ ID NO: 1402 - DNA, 651 bp, Homo sapiens; identical to SEQ ID NO: 304

SEQ ID NO: 1403 - DNA, 530 bp, Homo sapiens; identical to SEQ ID NO: 313

SEQ ID NO: 1404 - DNA, 380 bp, Homo sapiens; identical to SEQ ID NO: 316

SEQ ID NO: 1405 - DNA, 421 bp, Homo sapiens; identical to SEQ ID NO: 318

SEQ ID NO: 1406 - DNA, 448 bp, Homo sapiens; identical to SEQ ID NO: 322

SEQ ID NO: 1407 - DNA, 519 bp, Homo sapiens; identical to SEQ ID NO: 325

SEQ ID NO: 1408 - DNA, 459 bp, Homo sapiens; identical to SEQ ID NO: 326

SEQ ID NO: 1409 - DNA, 492 bp, Homo sapiens; identical to SEQ ID NO: 330

SEQ ID NO: 1410 - DNA, 396 bp, Homo sapiens; identical to SEQ ID NO: 338

SEQ ID NO: 1411 - DNA, 363 bp, Homo sapiens; identical to SEQ ID NO: 390

SEQ ID NO: 1412 - DNA, 509 bp, Homo sapiens; identical to SEQ ID NO: 397

SEQ ID NO: 1413 - DNA, 424 bp, Homo sapiens; identical to SEQ ID NO: 351

SEQ ID NO: 1414 - DNA, 651 bp, Homo sapiens; identical to SEQ ID NO: 354

SEQ ID NO: 1415 - DNA, 530 bp, Homo sapiens; identical to SEQ ID NO: 363

SEQ ID NO: 1416 - DNA, 380 bp, Homo sapiens; identical to SEQ ID NO: 366

SEQ ID NO: 1417 - DNA, 421 bp, Homo sapiens; identical to SEQ ID NO: 368

SEQ ID NO: 1418 - DNA, 448 bp, Homo sapiens; identical to SEQ ID NO: 372

SEQ ID NO: 1419 - DNA, 519 bp, Homo sapiens; identical to SEQ ID NO: 375

SEQ ID NO: 1420 - DNA, 459 bp, Homo sapiens; identical to SEQ ID NO: 376

SEQ ID NO: 1421 - DNA, 492 bp, Homo sapiens; identical to SEQ ID NO: 380

SEQ ID NO: 1422 - DNA, 396 bp, Homo sapiens; identical to SEQ ID NO: 388

SEQ ID NO: 1423 - DNA, 363 bp, Artificial Sequence; identical to SEQ ID NO: 440
  Description of Artificial Sequence: Synthetic polynucleotide

SEQ ID NO: 1424 - DNA, 509 bp, Artificial Sequence; identical to SEQ ID NO: 447
  Description of Artificial Sequence: Synthetic polynucleotide

SEQ ID NO: 1425 - DNA, 424 bp, Artificial Sequence; identical to SEQ ID NO: 401
  Description of Artificial Sequence: Synthetic polynucleotide

SEQ ID NO: 1426 - DNA, 651 bp, Artificial Sequence; identical to SEQ ID NO: 404
  Description of Artificial Sequence: Synthetic polynucleotide

SEQ ID NO: 1427 - DNA, 530 bp, Artificial Sequence; identical to SEQ ID NO: 413
  Description of Artificial Sequence: Synthetic polynucleotide

SEQ ID NO: 1428 - DNA, 380 bp, Artificial Sequence; identical to SEQ ID NO: 416
  Description of Artificial Sequence: Synthetic polynucleotide

SEQ ID NO: 1429 - DNA, 421 bp, Artificial Sequence; identical to SEQ ID NO: 418
  Description of Artificial Sequence: Synthetic polynucleotide

SEQ ID NO: 1430 - DNA, 448 bp, Artificial Sequence; identical to SEQ ID NO: 422
  Description of Artificial Sequence: Synthetic polynucleotide

SEQ ID NO: 1431 - DNA, 519 bp, Artificial Sequence; identical to SEQ ID NO: 425
  Description of Artificial Sequence: Synthetic polynucleotide

SEQ ID NO: 1432 - DNA, 459 bp, Artificial Sequence; identical to SEQ ID NO: 426
  Description of Artificial Sequence: Synthetic polynucleotide

SEQ ID NO: 1433 - DNA, 492 bp, Artificial Sequence; identical to SEQ ID NO: 430
  Description of Artificial Sequence: Synthetic polynucleotide

SEQ ID NO: 1434 - DNA, 396 bp, Artificial Sequence; identical to SEQ ID NO: 438
  Description of Artificial Sequence: Synthetic polynucleotide

SEQ ID NO: 1435 - DNA, 363 bp, Artificial Sequence; identical to SEQ ID NO: 490
  Description of Artificial Sequence: Synthetic polynucleotide

SEQ ID NO: 1436 - DNA, 509 bp, Artificial Sequence; identical to SEQ ID NO: 497
  Description of Artificial Sequence: Synthetic polynucleotide

SEQ ID NO: 1437 - DNA, 424 bp, Artificial Sequence; identical to SEQ ID NO: 451
  Description of Artificial Sequence: Synthetic polynucleotide

SEQ ID NO: 1438 - DNA, 651 bp, Artificial Sequence; identical to SEQ ID NO: 454
  Description of Artificial Sequence: Synthetic polynucleotide

SEQ ID NO: 1439 - DNA, 530 bp, Artificial Sequence; identical to SEQ ID NO: 463
  Description of Artificial Sequence: Synthetic polynucleotide

SEQ ID NO: 1440 - DNA, 380 bp, Artificial Sequence; identical to SEQ ID NO: 466
  Description of Artificial Sequence: Synthetic polynucleotide

SEQ ID NO: 1441 - DNA, 421 bp, Artificial Sequence; identical to SEQ ID NO: 468
  Description of Artificial Sequence: Synthetic polynucleotide

SEQ ID NO: 1442 - DNA, 448 bp, Artificial Sequence; identical to SEQ ID NO: 472
  Description of Artificial Sequence: Synthetic polynucleotide

SEQ ID NO: 1443 - DNA, 519 bp, Artificial Sequence; identical to SEQ ID NO: 475
  Description of Artificial Sequence: Synthetic polynucleotide

SEQ ID NO: 1444 - DNA, 459 bp, Artificial Sequence; identical to SEQ ID NO: 476
  Description of Artificial Sequence: Synthetic polynucleotide

SEQ ID NO: 1445 - DNA, 492 bp, Artificial Sequence; identical to SEQ ID NO: 480
  Description of Artificial Sequence: Synthetic polynucleotide

SEQ ID NO: 1446 - DNA, 396 bp, Artificial Sequence; identical to SEQ ID NO: 488
  Description of Artificial Sequence: Synthetic polynucleotide

SEQ ID NO: 1447 - DNA, 363 bp, Artificial Sequence; identical to SEQ ID NO: 540
  Description of Artificial Sequence: Synthetic polynucleotide

SEQ ID NO: 1448 - DNA, 509 bp, Artificial Sequence; identical to SEQ ID NO: 547
  Description of Artificial Sequence: Synthetic polynucleotide

SEQ ID NO: 1449 - DNA, 424 bp, Artificial Sequence; identical to SEQ ID NO: 501
  Description of Artificial Sequence: Synthetic polynucleotide

SEQ ID NO: 1450 - DNA, 651 bp, Artificial Sequence; identical to SEQ ID NO: 504
  Description of Artificial Sequence: Synthetic polynucleotide

SEQ ID NO: 1451 - DNA, 530 bp, Artificial Sequence; identical to SEQ ID NO: 513
  Description of Artificial Sequence: Synthetic polynucleotide

SEQ ID NO: 1452 - DNA, 380 bp, Artificial Sequence; identical to SEQ ID NO: 516
  Description of Artificial Sequence: Synthetic polynucleotide

SEQ ID NO: 1453 - DNA, 421 bp, Artificial Sequence; identical to SEQ ID NO: 518
  Description of Artificial Sequence: Synthetic polynucleotide

SEQ ID NO: 1454 - DNA, 448 bp, Artificial Sequence; identical to SEQ ID NO: 522
  Description of Artificial Sequence: Synthetic polynucleotide

SEQ ID NO: 1455 - DNA, 519 bp, Artificial Sequence; identical to SEQ ID NO: 525
  Description of Artificial Sequence: Synthetic polynucleotide

SEQ ID NO: 1456 - DNA, 459 bp, Artificial Sequence; identical to SEQ ID NO: 526
  Description of Artificial Sequence: Synthetic polynucleotide

SEQ ID NO: 1457 - DNA, 492 bp, Artificial Sequence; identical to SEQ ID NO: 530
  Description of Artificial Sequence: Synthetic polynucleotide

SEQ ID NO: 1458 - DNA, 396 bp, Artificial Sequence; identical to SEQ ID NO: 538
  Description of Artificial Sequence: Synthetic polynucleotide

SEQ ID NO: 1459 - DNA, 363 bp, Artificial Sequence; identical to SEQ ID NO: 590
  Description of Artificial Sequence: Synthetic polynucleotide

SEQ ID NO: 1460 - DNA, 509 bp, Artificial Sequence; identical to SEQ ID NO: 597
  Description of Artificial Sequence: Synthetic polynucleotide

SEQ ID NO: 1461 - DNA, 424 bp, Artificial Sequence; identical to SEQ ID NO: 551
  Description of Artificial Sequence: Synthetic polynucleotide

SEQ ID NO: 1462 - DNA, 651 bp, Artificial Sequence; identical to SEQ ID NO: 554
  Description of Artificial Sequence: Synthetic polynucleotide

SEQ ID NO: 1463 - DNA, 530 bp, Artificial Sequence; identical to SEQ ID NO: 563
  Description of Artificial Sequence: Synthetic polynucleotide

SEQ ID NO: 1464 - DNA, 380 bp, Artificial Sequence; identical to SEQ ID NO: 566
  Description of Artificial Sequence: Synthetic polynucleotide

SEQ ID NO: 1465 - DNA, 421 bp, Artificial Sequence; identical to SEQ ID NO: 568
  Description of Artificial Sequence: Synthetic polynucleotide

SEQ ID NO: 1466 - DNA, 448 bp, Artificial Sequence; identical to SEQ ID NO: 572
  Description of Artificial Sequence: Synthetic polynucleotide

SEQ ID NO: 1467 - DNA, 519 bp, Artificial Sequence; identical to SEQ ID NO: 575
  Description of Artificial Sequence: Synthetic polynucleotide

SEQ ID NO: 1468 - DNA, 459 bp, Artificial Sequence; identical to SEQ ID NO: 576
  Description of Artificial Sequence: Synthetic polynucleotide

SEQ ID NO: 1469 - DNA, 492 bp, Artificial Sequence; identical to SEQ ID NO: 580
  Description of Artificial Sequence: Synthetic polynucleotide

SEQ ID NO: 1470 - DNA, 396 bp, Artificial Sequence; identical to SEQ ID NO: 588
  Description of Artificial Sequence: Synthetic polynucleotide

SEQ ID NO: 1471 - DNA, 1281 bp, Homo sapiens; identical to SEQ ID NO: 636

SEQ ID NO: 1472 - DNA, 1770 bp, Homo sapiens; identical to SEQ ID NO: 601

SEQ ID NO: 1473 - DNA, 1861 bp, Homo sapiens; identical to SEQ ID NO: 611

SEQ ID NO: 1474 - DNA, 3723 bp, Homo sapiens; identical to SEQ ID NO: 614

SEQ ID NO: 1475 - DNA, 1101 bp, Homo sapiens; identical to SEQ ID NO: 616

SEQ ID NO: 1476 - DNA, 1146 bp, Homo sapiens; identical to SEQ ID NO: 619

SEQ ID NO: 1477 - DNA, 1497 bp, Homo sapiens; identical to SEQ ID NO: 622

SEQ ID NO: 1478 - DNA, 1845 bp, Homo sapiens; identical to SEQ ID NO: 623

SEQ ID NO: 1479 - DNA, 1134 bp, Homo sapiens; identical to SEQ ID NO: 627

SEQ ID NO: 1480 - DNA, 1281 bp, Homo sapiens; identical to SEQ ID NO: 681

SEQ ID NO: 1481 - DNA, 1770 bp, Homo sapiens; identical to SEQ ID NO: 646

SEQ ID NO: 1482 - DNA, 1861 bp, Homo sapiens; identical to SEQ ID NO: 656

SEQ ID NO: 1483 - DNA, 3723 bp, Homo sapiens; identical to SEQ ID NO: 659

SEQ ID NO: 1484 - DNA, 1101 bp, Homo sapiens; identical to SEQ ID NO: 661

SEQ ID NO: 1485 - DNA, 1146 bp, Homo sapiens; identical to SEQ ID NO: 664

SEQ ID NO: 1486 - DNA, 1497 bp, Homo sapiens; identical to SEQ ID NO: 667

SEQ ID NO: 1487 - DNA, 1845 bp, Homo sapiens; identical to SEQ ID NO: 668

SEQ ID NO: 1488 - DNA, 1134 bp, Homo sapiens; identical to SEQ ID NO: 672

SEQ ID NO: 1489 - DNA, 1281 bp, Artificial Sequence; identical to SEQ ID NO: 726
  Description of Artificial Sequence: Synthetic polynucleotide

SEQ ID NO: 1490 - DNA, 1770 bp, Artificial Sequence; identical to SEQ ID NO: 691
  Description of Artificial Sequence: Synthetic polynucleotide

SEQ ID NO: 1491 - DNA, 1861 bp, Artificial Sequence; identical to SEQ ID NO: 701
  Description of Artificial Sequence: Synthetic polynucleotide

SEQ ID NO: 1492 - DNA, 3723 bp, Artificial Sequence; identical to SEQ ID NO: 704
  Description of Artificial Sequence: Synthetic polynucleotide

SEQ ID NO: 1493 - DNA, 1101 bp, Artificial Sequence; identical to SEQ ID NO: 706
  Description of Artificial Sequence: Synthetic polynucleotide

SEQ ID NO: 1494 - DNA, 1146 bp, Artificial Sequence; identical to SEQ ID NO: 709
  Description of Artificial Sequence: Synthetic polynucleotide

SEQ ID NO: 1495 - DNA, 1497 bp, Artificial Sequence; identical to SEQ ID NO: 712
  Description of Artificial Sequence: Synthetic polynucleotide

SEQ ID NO: 1496 - DNA, 1845 bp, Artificial Sequence; identical to SEQ ID NO: 713
  Description of Artificial Sequence: Synthetic polynucleotide

SEQ ID NO: 1497 - DNA, 1134 bp, Artificial Sequence; identical to SEQ ID NO: 717
  Description of Artificial Sequence: Synthetic polynucleotide

SEQ ID NO: 1498 - DNA, 1281 bp, Artificial Sequence; identical to SEQ ID NO: 771
  Description of Artificial Sequence: Synthetic polynucleotide

SEQ ID NO: 1499 - DNA, 1770 bp, Artificial Sequence; identical to SEQ ID NO: 736
  Description of Artificial Sequence: Synthetic polynucleotide

SEQ ID NO: 1500 - DNA, 1861 bp, Artificial Sequence; identical to SEQ ID NO: 746
  Description of Artificial Sequence: Synthetic polynucleotide

SEQ ID NO: 1501 - DNA, 3723 bp, Artificial Sequence; identical to SEQ ID NO: 749
  Description of Artificial Sequence: Synthetic polynucleotide

SEQ ID NO: 1502 - DNA, 1101 bp, Artificial Sequence; identical to SEQ ID NO: 751
  Description of Artificial Sequence: Synthetic polynucleotide

SEQ ID NO: 1503 - DNA, 1146 bp, Artificial Sequence; identical to SEQ ID NO: 754
  Description of Artificial Sequence: Synthetic polynucleotide

SEQ ID NO: 1504 - DNA, 1497 bp, Artificial Sequence; identical to SEQ ID NO: 757
  Description of Artificial Sequence: Synthetic polynucleotide

SEQ ID NO: 1505 - DNA, 1845 bp, Artificial Sequence; identical to SEQ ID NO: 758
  Description of Artificial Sequence: Synthetic polynucleotide

SEQ ID NO: 1506 - DNA, 1134 bp, Artificial Sequence; identical to SEQ ID NO: 762
  Description of Artificial Sequence: Synthetic polynucleotide

SEQ ID NO: 1507 - DNA, 1281 bp, Artificial Sequence; identical to SEQ ID NO: 816
  Description of Artificial Sequence: Synthetic polynucleotide

SEQ ID NO: 1508 - DNA, 1770 bp, Artificial Sequence; identical to SEQ ID NO: 781
  Description of Artificial Sequence: Synthetic polynucleotide

SEQ ID NO: 1509 - DNA, 1861 bp, Artificial Sequence; identical to SEQ ID NO: 791
  Description of Artificial Sequence: Synthetic polynucleotide

SEQ ID NO: 1510 - DNA, 3723 bp, Artificial Sequence; identical to SEQ ID NO: 794
  Description of Artificial Sequence: Synthetic polynucleotide

SEQ ID NO: 1511 - DNA, 1101 bp, Artificial Sequence; identical to SEQ ID NO: 796
  Description of Artificial Sequence: Synthetic polynucleotide

SEQ ID NO: 1512 - DNA, 1146 bp, Artificial Sequence; identical to SEQ ID NO: 799
  Description of Artificial Sequence: Synthetic polynucleotide

SEQ ID NO: 1513 - DNA, 1497 bp, Artificial Sequence; identical to SEQ ID NO: 802
  Description of Artificial Sequence: Synthetic polynucleotide

SEQ ID NO: 1514 - DNA, 1845 bp, Artificial Sequence; identical to SEQ ID NO: 803
  Description of Artificial Sequence: Synthetic polynucleotide

SEQ ID NO: 1515 - DNA, 1134 bp, Artificial Sequence; identical to SEQ ID NO: 807
  Description of Artificial Sequence: Synthetic polynucleotide

SEQ ID NO: 1516 - DNA, 1281 bp, Artificial Sequence; identical to SEQ ID NO: 861
  Description of Artificial Sequence: Synthetic polynucleotide

SEQ ID NO: 1517 - DNA, 1770 bp, Artificial Sequence; identical to SEQ ID NO: 826
  Description of Artificial Sequence: Synthetic polynucleotide

SEQ ID NO: 1518 - DNA, 1861 bp, Artificial Sequence; identical to SEQ ID NO: 836
  Description of Artificial Sequence: Synthetic polynucleotide

SEQ ID NO: 1519 - DNA, 3723 bp, Artificial Sequence; identical to SEQ ID NO: 839
  Description of Artificial Sequence: Synthetic polynucleotide

SEQ ID NO: 1520 - DNA, 1101 bp, Artificial Sequence; identical to SEQ ID NO: 841
  Description of Artificial Sequence: Synthetic polynucleotide

SEQ ID NO: 1521 - DNA, 1146 bp, Artificial Sequence; identical to SEQ ID NO: 844
  Description of Artificial Sequence: Synthetic polynucleotide

SEQ ID NO: 1522 - DNA, 1497 bp, Artificial Sequence; identical to SEQ ID NO: 847
  Description of Artificial Sequence: Synthetic polynucleotide

SEQ ID NO: 1523 - DNA, 1845 bp, Artificial Sequence; identical to SEQ ID NO: 848
  Description of Artificial Sequence: Synthetic polynucleotide

SEQ ID NO: 1524 - DNA, 1134 bp, Artificial Sequence; identical to SEQ ID NO: 852
  Description of Artificial Sequence: Synthetic polynucleotide

SEQ ID NO: 1525 - DNA, 24 bp, Artificial Sequence
  Description of Artificial Sequence: Synthetic primer
gatgygttgttgttgggaattggt

SEQ ID NO: 1526 - DNA, 22 bp, Artificial Sequence
  Description of Artificial Sequence: Synthetic primer
tygattgygttygtagggattt

SEQ ID NO: 1527 - DNA, 22 bp, Artificial Sequence
  Description of Artificial Sequence: Synthetic primer
tggagtggtggagttgtagttg

SEQ ID NO: 1528 - DNA, 23 bp, Artificial Sequence
  Description of Artificial Sequence: Synthetic primer
gygtagagtttygtagaggygga

SEQ ID NO: 1529 - DNA, 27 bp, Artificial Sequence
  Description of Artificial Sequence: Synthetic primer
gattttyggtgtatatttggggattgg

SEQ ID NO: 1530 - DNA, 20 bp, Artificial Sequence
  Description of Artificial Sequence: Synthetic primer
gggtygtaagtyggggagtt

SEQ ID NO: 1531 - DNA, 27 bp, Artificial Sequence
  Description of Artificial Sequence: Synthetic primer
gggagtygtttgttagttattyggtag

SEQ ID NO: 1532 - DNA, 23 bp, Artificial Sequence
  Description of Artificial Sequence: Synthetic primer
gagaygaagagaggyggtgagaa

SEQ ID NO: 1533 - DNA, 29 bp, Artificial Sequence
  Description of Artificial Sequence: Synthetic primer
agtttaattaaggatygtttagaggggtt

SEQ ID NO: 1534 - DNA, 20 bp, Artificial Sequence
  Description of Artificial Sequence: Synthetic primer
gyggagtttyggggaagagt

SEQ ID NO: 1535 - DNA, 22 bp, Artificial Sequence
  Description of Artificial Sequence: Synthetic primer
ggattgggatttgtttttgggg

SEQ ID NO: 1536 - DNA, 19 bp, Artificial Sequence
  Description of Artificial Sequence: Synthetic primer
gggtyggagtygtttgagt

SEQ ID NO: 1537 - DNA, 25 bp, Artificial Sequence
  Description of Artificial Sequence: Synthetic primer
aaacrattacaaccctacraaactc

SEQ ID NO: 1538 - DNA, 21 bp, Artificial Sequence
  Description of Artificial Sequence: Synthetic primer
crcccactacrtactaccttc

SEQ ID NO: 1539 - DNA, 23 bp, Artificial Sequence
  Description of Artificial Sequence: Synthetic primer
aacttccacrccatctctacaac

SEQ ID NO: 1540 - DNA, 29 bp, Artificial Sequence
  Description of Artificial Sequence: Synthetic primer
tctaaccrtttaaaaccraatcttaaccc

SEQ ID NO: 1541 - DNA, 29 bp, Artificial Sequence
  Description of Artificial Sequence: Synthetic primer
tcctactcaccttaaacttaataacctac

SEQ ID NO: 1542 - DNA, 23 bp, Artificial Sequence
  Description of Artificial Sequence: Synthetic primer
taaccaccacctcrcttcattcc

SEQ ID NO: 1543 - DNA, 24 bp, Artificial Sequence
  Description of Artificial Sequence: Synthetic primer
actccccaacctaatctactaaac

SEQ ID NO: 1544 - DNA, 24 bp, Artificial Sequence
  Description of Artificial Sequence: Synthetic primer
ctacaaacrcracccaaaacccct

SEQ ID NO: 1545 - DNA, 26 bp, Artificial Sequence
  Description of Artificial Sequence: Synthetic primer
ttcraactcaccctcaaatttaacca

SEQ ID NO: 1546 - DNA, 20 bp, Artificial Sequence
  Description of Artificial Sequence: Synthetic primer
caaccccaaccaaaacttcc

SEQ ID NO: 1547 - DNA, 23 bp, Artificial Sequence
  Description of Artificial Sequence: Synthetic primer
crtccttccttctttttaaaccc

SEQ ID NO: 1548 - DNA, 16 bp, Artificial Sequence
  Description of Artificial Sequence: Synthetic primer
ccacccccacttccac

SEQ ID NO: 1549 - DNA, 20 bp, Artificial Sequence
  Description of Artificial Sequence: Synthetic primer
ggaagttttggttggggttg

SEQ ID NO: 1550 - DNA, 25 bp, Artificial Sequence
  Description of Artificial Sequence: Synthetic primer
caccaatacctacttttccacrcac

SEQ ID NO: 1551 - DNA, 179 bp, Homo sapiens; identical to SEQ ID NO: 1024

SEQ ID NO: 1552 - DNA, 242 bp, Homo sapiens; identical to SEQ ID NO: 1031

SEQ ID NO: 1553 - DNA, 228 bp, Homo sapiens; identical to SEQ ID NO: 985

SEQ ID NO: 1554 - DNA, 191 bp, Homo sapiens; identical to SEQ ID NO: 988

SEQ ID NO: 1555 - DNA, 165 bp, Homo sapiens; identical to SEQ ID NO: 997

SEQ ID NO: 1556 - DNA, 210 bp, Homo sapiens; identical to SEQ ID NO: 1000

SEQ ID NO: 1557 - DNA, 186 bp, Homo sapiens; identical to SEQ ID NO: 1002

SEQ ID NO: 1558 - DNA, 200 bp, Homo sapiens; identical to SEQ ID NO: 1006

SEQ ID NO: 1559 - DNA, 216 bp, Homo sapiens; identical to SEQ ID NO: 1009

SEQ ID NO: 1560 - DNA, 194 bp, Homo sapiens; identical to SEQ ID NO: 1010

SEQ ID NO: 1561 - DNA, 191 bp, Homo sapiens; identical to SEQ ID NO: 1014

SEQ ID NO: 1562 - DNA, 190 bp, Homo sapiens; identical to SEQ ID NO: 1022

SEQ ID NO: 1563 - DNA, 179 bp, Homo sapiens; identical to SEQ ID NO: 1074

SEQ ID NO: 1564 - DNA, 242 bp, Homo sapiens; identical to SEQ ID NO: 1081

SEQ ID NO: 1565 - DNA, 228 bp, Homo sapiens; identical to SEQ ID NO: 1035

SEQ ID NO: 1566 - DNA, 191 bp, Homo sapiens; identical to SEQ ID NO: 1038

SEQ ID NO: 1567 - DNA, 167 bp, Homo sapiens; identical to SEQ ID NO: 1047

SEQ ID NO: 1568 - DNA, 210 bp, Homo sapiens; identical to SEQ ID NO: 1050

SEQ ID NO: 1569 - DNA, 186 bp, Homo sapiens; identical to SEQ ID NO: 1052

SEQ ID NO: 1570 - DNA, 200 bp, Homo sapiens; identical to SEQ ID NO: 1056

SEQ ID NO: 1571 - DNA, 216 bp, Homo sapiens; identical to SEQ ID NO: 1059

SEQ ID NO: 1572 - DNA, 194 bp, Homo sapiens; identical to SEQ ID NO: 1060

SEQ ID NO: 1573 - DNA, 191 bp, Homo sapiens; identical to SEQ ID NO: 1064

SEQ ID NO: 1574 - DNA, 190 bp, Homo sapiens; identical to SEQ ID NO: 1072

SEQ ID NO: 1575 - DNA, 171 bp, Homo sapiens; identical to SEQ ID NO: 1088

SEQ ID NO: 1576 - DNA, 171 bp, Homo sapiens; identical to SEQ ID NO: 1095

SEQ ID NO: 1577 - DNA, 179 bp, Artificial Sequence; identical to SEQ ID NO: 1138
  Description of Artificial Sequence: Synthetic polynucleotide

SEQ ID NO: 1578 - DNA, 242 bp, Artificial Sequence; identical to SEQ ID NO: 1145
  Description of Artificial Sequence: Synthetic polynucleotide

SEQ ID NO: 1579 - DNA, 228 bp, Artificial Sequence; identical to SEQ ID NO: 1099
  Description of Artificial Sequence: Synthetic polynucleotide

SEQ ID NO: 1580 - DNA, 191 bp, Artificial Sequence; identical to SEQ ID NO: 1102
  Description of Artificial Sequence: Synthetic polynucleotide

SEQ ID NO: 1581 - DNA, 165 bp, Artificial Sequence; identical to SEQ ID NO: 1111
  Description of Artificial Sequence: Synthetic polynucleotide

SEQ ID NO: 1582 - DNA, 210 bp, Artificial Sequence; identical to SEQ ID NO: 1114
  Description of Artificial Sequence: Synthetic polynucleotide

SEQ ID NO: 1583 - DNA, 186 bp, Artificial Sequence; identical to SEQ ID NO: 1116
  Description of Artificial Sequence: Synthetic polynucleotide

SEQ ID NO: 1584 - DNA, 200 bp, Artificial Sequence; identical to SEQ ID NO: 1120
  Description of Artificial Sequence: Synthetic polynucleotide

SEQ ID NO: 1585 - DNA, 216 bp, Artificial Sequence; identical to SEQ ID NO: 1123
  Description of Artificial Sequence: Synthetic polynucleotide

SEQ ID NO: 1586 - DNA, 194 bp, Artificial Sequence; identical to SEQ ID NO: 1124
  Description of Artificial Sequence: Synthetic polynucleotide

SEQ ID NO: 1587 - DNA, 191 bp, Artificial Sequence; identical to SEQ ID NO: 1128
  Description of Artificial Sequence: Synthetic polynucleotide

SEQ ID NO: 1588 - DNA, 190 bp, Artificial Sequence; identical to SEQ ID NO: 1136
  Description of Artificial Sequence: Synthetic polynucleotide

SEQ ID NO: 1589 - DNA, 179 bp, Artificial Sequence; identical to SEQ ID NO: 1188
  Description of Artificial Sequence: Synthetic polynucleotide

SEQ ID NO: 1590 - DNA, 242 bp, Artificial Sequence; identical to SEQ ID NO: 1195
  Description of Artificial Sequence: Synthetic polynucleotide

SEQ ID NO: 1591 - DNA, 228 bp, Artificial Sequence; identical to SEQ ID NO: 1149
  Description of Artificial Sequence: Synthetic polynucleotide

SEQ ID NO: 1592 - DNA, 191 bp, Artificial Sequence; identical to SEQ ID NO: 1152
  Description of Artificial Sequence: Synthetic polynucleotide

SEQ ID NO: 1593 - DNA, 167 bp, Artificial Sequence; identical to SEQ ID NO: 1161
  Description of Artificial Sequence: Synthetic polynucleotide

SEQ ID NO: 1594 - DNA, 210 bp, Artificial Sequence; identical to SEQ ID NO: 1164
  Description of Artificial Sequence: Synthetic polynucleotide

SEQ ID NO: 1595 - DNA, 186 bp, Artificial Sequence; identical to SEQ ID NO: 1166
  Description of Artificial Sequence: Synthetic polynucleotide

SEQ ID NO: 1596 - DNA, 200 bp, Artificial Sequence; identical to SEQ ID NO: 1170
  Description of Artificial Sequence: Synthetic polynucleotide

SEQ ID NO: 1597 - DNA, 216 bp, Artificial Sequence; identical to SEQ ID NO: 1173
  Description of Artificial Sequence: Synthetic polynucleotide

SEQ ID NO: 1598 - DNA, 194 bp, Artificial Sequence; identical to SEQ ID NO: 1174
  Description of Artificial Sequence: Synthetic polynucleotide

SEQ ID NO: 1599 - DNA, 191 bp, Artificial Sequence; identical to SEQ ID NO: 1178
  Description of Artificial Sequence: Synthetic polynucleotide

SEQ ID NO: 1600 - DNA, 190 bp, Artificial Sequence; identical to SEQ ID NO: 1186
  Description of Artificial Sequence: Synthetic polynucleotide

SEQ ID NO: 1601 - DNA, 171 bp, Artificial Sequence; identical to SEQ ID NO: 1202
  Description of Artificial Sequence: Synthetic polynucleotide

SEQ ID NO: 1602 - DNA, 171 bp, Artificial Sequence; identical to SEQ ID NO: 1209
  Description of Artificial Sequence: Synthetic polynucleotide

SEQ ID NO: 1603 - DNA, 179 bp, Artificial Sequence; identical to SEQ ID NO: 1252
  Description of Artificial Sequence: Synthetic polynucleotide

SEQ ID NO: 1604 - DNA, 242 bp, Artificial Sequence; identical to SEQ ID NO: 1259
  Description of Artificial Sequence: Synthetic polynucleotide

SEQ ID NO: 1605 - DNA, 228 bp, Artificial Sequence; identical to SEQ ID NO: 1213
  Description of Artificial Sequence: Synthetic polynucleotide

SEQ ID NO: 1606 - DNA, 191 bp, Artificial Sequence; identical to SEQ ID NO: 1216
  Description of Artificial Sequence: Synthetic polynucleotide

SEQ ID NO: 1607 - DNA, 165 bp, Artificial Sequence; identical to SEQ ID NO: 1225
  Description of Artificial Sequence: Synthetic polynucleotide

SEQ ID NO: 1608 - DNA, 210 bp, Artificial Sequence; identical to SEQ ID NO: 1228
  Description of Artificial Sequence: Synthetic polynucleotide

SEQ ID NO: 1609 - DNA, 186 bp, Artificial Sequence; identical to SEQ ID NO: 1230
  Description of Artificial Sequence: Synthetic polynucleotide

SEQ ID NO: 1610 - DNA, 200 bp, Artificial Sequence; identical to SEQ ID NO: 1234
  Description of Artificial Sequence: Synthetic polynucleotide

SEQ ID NO: 1611 - DNA, 216 bp, Artificial Sequence; identical to SEQ ID NO: 1237
  Description of Artificial Sequence: Synthetic polynucleotide

SEQ ID NO: 1612 - DNA, 194 bp, Artificial Sequence; identical to SEQ ID NO: 1238
  Description of Artificial Sequence: Synthetic polynucleotide

SEQ ID NO: 1613 - DNA, 191 bp, Artificial Sequence; identical to SEQ ID NO: 1242
  Description of Artificial Sequence: Synthetic polynucleotide

SEQ ID NO: 1614 - DNA, 190 bp, Artificial Sequence; identical to SEQ ID NO: 1250
  Description of Artificial Sequence: Synthetic polynucleotide

SEQ ID NO: 1615 - DNA, 179 bp, Artificial Sequence; identical to SEQ ID NO: 1302
  Description of Artificial Sequence: Synthetic polynucleotide

SEQ ID NO: 1616 - DNA, 242 bp, Artificial Sequence; identical to SEQ ID NO: 1309
  Description of Artificial Sequence: Synthetic polynucleotide

SEQ ID NO: 1617 - DNA, 228 bp, Artificial Sequence; identical to SEQ ID NO: 1263
  Description of Artificial Sequence: Synthetic polynucleotide

SEQ ID NO: 1618 - DNA, 191 bp, Artificial Sequence; identical to SEQ ID NO: 1266
  Description of Artificial Sequence: Synthetic polynucleotide

SEQ ID NO: 1619 - DNA, 167 bp, Artificial Sequence; identical to SEQ ID NO: 1275
  Description of Artificial Sequence: Synthetic polynucleotide

SEQ ID NO: 1620 - DNA, 210 bp, Artificial Sequence; identical to SEQ ID NO: 1278
  Description of Artificial Sequence: Synthetic polynucleotide

SEQ ID NO: 1621 - DNA, 186 bp, Artificial Sequence; identical to SEQ ID NO: 1280
  Description of Artificial Sequence: Synthetic polynucleotide

SEQ ID NO: 1622 - DNA, 200 bp, Artificial Sequence; identical to SEQ ID NO: 1284
  Description of Artificial Sequence: Synthetic polynucleotide

SEQ ID NO: 1623 - DNA, 216 bp, Artificial Sequence; identical to SEQ ID NO: 1287
  Description of Artificial Sequence: Synthetic polynucleotide

SEQ ID NO: 1624 - DNA, 194 bp, Artificial Sequence; identical to SEQ ID NO: 1288
  Description of Artificial Sequence: Synthetic polynucleotide

SEQ ID NO: 1625 - DNA, 191 bp, Artificial Sequence; identical to SEQ ID NO: 1292
  Description of Artificial Sequence: Synthetic polynucleotide

SEQ ID NO: 1626 - DNA, 190 bp, Artificial Sequence; identical to SEQ ID NO: 1300
  Description of Artificial Sequence: Synthetic polynucleotide

SEQ ID NO: 1627 - DNA, 171 bp, Artificial Sequence; identical to SEQ ID NO: 1316
  Description of Artificial Sequence: Synthetic polynucleotide

SEQ ID NO: 1628 - DNA, 171 bp, Artificial Sequence; identical to SEQ ID NO: 1323
  Description of Artificial Sequence: Synthetic polynucleotide

SEQ ID NO: 1629 - DNA, 125 bp, Homo sapiens; identical to SEQ ID NO: 4

SEQ ID NO: 1630 - DNA, 64 bp, Homo sapiens; identical to SEQ ID NO: 13

SEQ ID NO: 1631 - DNA, 112 bp, Homo sapiens; identical to SEQ ID NO: 22

SEQ ID NO: 1632 - DNA, 10 bp, Homo sapiens
cgtccgctcg

SEQ ID NO: 1633 - DNA, 125 bp, Homo sapiens; identical to SEQ ID NO: 54

SEQ ID NO: 1634 - DNA, 64 bp, Homo sapiens; identical to SEQ ID NO: 63

SEQ ID NO: 1635 - DNA, 112 bp, Homo sapiens; identical to SEQ ID NO: 72

SEQ ID NO: 1636 - DNA, 10 bp, Homo sapiens
cgagcggacg

SEQ ID NO: 1637 - DNA, 125 bp, Artificial Sequence; identical to SEQ ID NO: 104
  Description of Artificial Sequence: Synthetic polynucleotide

SEQ ID NO: 1638 - DNA, 64 bp, Artificial Sequence; identical to SEQ ID NO: 113
  Description of Artificial Sequence: Synthetic oligonucleotide

SEQ ID NO: 1639 - DNA, 112 bp, Artificial Sequence; identical to SEQ ID NO: 122
  Description of Artificial Sequence: Synthetic polynucleotide

SEQ ID NO: 1640 - DNA, 10 bp, Artificial Sequence
  Description of Artificial Sequence: Synthetic oligonucleotide
ygttygttyg

SEQ ID NO: 1641 - DNA, 125 bp, Artificial Sequence; identical to SEQ ID NO: 154
  Description of Artificial Sequence: Synthetic polynucleotide

SEQ ID NO: 1642 - DNA, 64 bp, Artificial Sequence; identical to SEQ ID NO: 163
  Description of Artificial Sequence: Synthetic oligonucleotide

SEQ ID NO: 1643 - DNA, 112 bp, Artificial Sequence; identical to SEQ ID NO: 172
  Description of Artificial Sequence: Synthetic polynucleotide

SEQ ID NO: 1644 - DNA, 10 bp, Artificial Sequence
  Description of Artificial Sequence: Synthetic oligonucleotide
ygagyggayg

SEQ ID NO: 1645 - DNA, 125 bp, Artificial Sequence; identical to SEQ ID NO: 204
  Description of Artificial Sequence: Synthetic polynucleotide

SEQ ID NO: 1646 - DNA, 64 bp, Artificial Sequence; identical to SEQ ID NO: 213
  Description of Artificial Sequence: Synthetic oligonucleotide

SEQ ID NO: 1647 - DNA, 112 bp, Artificial Sequence; identical to SEQ ID NO: 222
  Description of Artificial Sequence: Synthetic polynucleotide

SEQ ID NO: 1648 - DNA, 10 bp, Artificial Sequence
  Description of Artificial Sequence: Synthetic oligonucleotide
cgttcgttcg

SEQ ID NO: 1649 - DNA, 125 bp, Artificial Sequence; identical to SEQ ID NO: 254
  Description of Artificial Sequence: Synthetic polynucleotide

SEQ ID NO: 1650 - DNA, 64 bp, Artificial Sequence; identical to SEQ ID NO: 263
  Description of Artificial Sequence: Synthetic oligonucleotide

SEQ ID NO: 1651 - DNA, 112 bp, Artificial Sequence; identical to SEQ ID NO: 272
  Description of Artificial Sequence: Synthetic polynucleotide

SEQ ID NO: 1652 - DNA, 10 bp, Artificial Sequence
  Description of Artificial Sequence: Synthetic oligonucleotide
cgagcggacg

SEQ ID NO: 1653 - DNA, 651 bp, Homo sapiens; identical to SEQ ID NO: 304

SEQ ID NO: 1654 - DNA, 530 bp, Homo sapiens; identical to SEQ ID NO: 313

SEQ ID NO: 1655 - DNA, 448 bp, Homo sapiens; identical to SEQ ID NO: 322

SEQ ID NO: 1656 - DNA, 396 bp, Homo sapiens; identical to SEQ ID NO: 338

SEQ ID NO: 1657 - DNA, 651 bp, Homo sapiens; identical to SEQ ID NO: 354

SEQ ID NO: 1658 - DNA, 530 bp, Homo sapiens; identical to SEQ ID NO: 363

SEQ ID NO: 1659 - DNA, 448 bp, Homo sapiens; identical to SEQ ID NO: 372

SEQ ID NO: 1660 - DNA, 396 bp, Homo sapiens; identical to SEQ ID NO: 388

SEQ ID NO: 1661 - DNA, 651 bp, Artificial Sequence; identical to SEQ ID NO: 404
  Description of Artificial Sequence: Synthetic polynucleotide

SEQ ID NO: 1662 - DNA, 530 bp, Artificial Sequence; identical to SEQ ID NO: 413
  Description of Artificial Sequence: Synthetic polynucleotide

SEQ ID NO: 1663 - DNA, 448 bp, Artificial Sequence; identical to SEQ ID NO: 422
  Description of Artificial Sequence: Synthetic polynucleotide

SEQ ID NO: 1664 - DNA, 396 bp, Artificial Sequence; identical to SEQ ID NO: 438
  Description of Artificial Sequence: Synthetic polynucleotide

SEQ ID NO: 1665 - DNA, 651 bp, Artificial Sequence; identical to SEQ ID NO: 454
  Description of Artificial Sequence: Synthetic polynucleotide

SEQ ID NO: 1666 - DNA, 530 bp, Artificial Sequence; identical to SEQ ID NO: 463
  Description of Artificial Sequence: Synthetic polynucleotide

SEQ ID NO: 1667 - DNA, 448 bp, Artificial Sequence; identical to SEQ ID NO: 472
  Description of Artificial Sequence: Synthetic polynucleotide

SEQ ID NO: 1668 - DNA, 396 bp, Artificial Sequence; identical to SEQ ID NO: 488
  Description of Artificial Sequence: Synthetic polynucleotide

SEQ ID NO: 1669 - DNA, 651 bp, Artificial Sequence; identical to SEQ ID NO: 504
  Description of Artificial Sequence: Synthetic polynucleotide

SEQ ID NO: 1670 - DNA, 530 bp, Artificial Sequence; identical to SEQ ID NO: 513
  Description of Artificial Sequence: Synthetic polynucleotide

SEQ ID NO: 1671 - DNA, 448 bp, Artificial Sequence; identical to SEQ ID NO: 522
  Description of Artificial Sequence: Synthetic polynucleotide

SEQ ID NO: 1672 - DNA, 396 bp, Artificial Sequence; identical to SEQ ID NO: 538
  Description of Artificial Sequence: Synthetic polynucleotide

SEQ ID NO: 1673 - DNA, 651 bp, Artificial Sequence; identical to SEQ ID NO: 554
  Description of Artificial Sequence: Synthetic polynucleotide

SEQ ID NO: 1674 - DNA, 530 bp, Artificial Sequence; identical to SEQ ID NO: 563
  Description of Artificial Sequence: Synthetic polynucleotide

SEQ ID NO: 1675 - DNA, 448 bp, Artificial Sequence; identical to SEQ ID NO: 572
  Description of Artificial Sequence: Synthetic polynucleotide

SEQ ID NO: 1676 - DNA, 396 bp, Artificial Sequence; identical to SEQ ID NO: 588
  Description of Artificial Sequence: Synthetic polynucleotide

SEQ ID NO: 1677 - DNA, 1861 bp, Homo sapiens; identical to SEQ ID NO: 611

SEQ ID NO: 1678 - DNA, 1146 bp, Homo sapiens; identical to SEQ ID NO: 619

SEQ ID NO: 1679 - DNA, 1861 bp, Homo sapiens; identical to SEQ ID NO: 656

SEQ ID NO: 1680 - DNA, 1146 bp, Homo sapiens; identical to SEQ ID NO: 664

SEQ ID NO: 1681 - DNA, 1861 bp, Artificial Sequence; identical to SEQ ID NO: 701
  Description of Artificial Sequence: Synthetic polynucleotide

SEQ ID NO: 1682 - DNA, 1146 bp, Artificial Sequence; identical to SEQ ID NO: 709
  Description of Artificial Sequence: Synthetic polynucleotide

SEQ ID NO: 1683 - DNA, 1861 bp, Artificial Sequence; identical to SEQ ID NO: 746
  Description of Artificial Sequence: Synthetic polynucleotide

SEQ ID NO: 1684 - DNA, 1146 bp, Artificial Sequence; identical to SEQ ID NO: 754
  Description of Artificial Sequence: Synthetic polynucleotide

SEQ ID NO: 1685 - DNA, 1861 bp, Artificial Sequence; identical to SEQ ID NO: 791
  Description of Artificial Sequence: Synthetic polynucleotide

SEQ ID NO: 1686 - DNA, 1146 bp, Artificial Sequence; identical to SEQ ID NO: 799
  Description of Artificial Sequence: Synthetic polynucleotide

SEQ ID NO: 1687 - DNA, 1861 bp, Artificial Sequence; identical to SEQ ID NO: 836
  Description of Artificial Sequence: Synthetic polynucleotide

SEQ ID NO: 1688 - DNA, 1146 bp, Artificial Sequence; identical to SEQ ID NO: 844
  Description of Artificial Sequence: Synthetic polynucleotide

SEQ ID NO: 1689 - DNA, 23 bp, Artificial Sequence
  Description of Artificial Sequence: Synthetic primer
gygtagagtttygtagaggygga

SEQ ID NO: 1690 - DNA, 27 bp, Artificial Sequence
  Description of Artificial Sequence: Synthetic primer
gattttyggtgtatatttggggattgg

SEQ ID NO: 1691 - DNA, 23 bp, Artificial Sequence
  Description of Artificial Sequence: Synthetic primer
gagaygaagagaggyggtgagaa

SEQ ID NO: 1692 - DNA, 19 bp, Artificial Sequence
  Description of Artificial Sequence: Synthetic primer
gggtyggagtygtttgagt

SEQ ID NO: 1693 - DNA, 29 bp, Artificial Sequence
  Description of Artificial Sequence: Synthetic primer
tctaaccrtttaaaaccraatcttaaccc

SEQ ID NO: 1694 - DNA, 29 bp, Artificial Sequence
  Description of Artificial Sequence: Synthetic primer
tcctactcaccttaaacttaataacctac

SEQ ID NO: 1695 - DNA, 24 bp, Artificial Sequence
  Description of Artificial Sequence: Synthetic primer
ctacaaacrcracccaaaacccct

SEQ ID NO: 1696 - DNA, 16 bp, Artificial Sequence
  Description of Artificial Sequence: Synthetic primer
ccacccccacttccac

SEQ ID NO: 1697 - DNA, 191 bp, Homo sapiens; identical to SEQ ID NO: 988

SEQ ID NO: 1698 - DNA, 165 bp, Homo sapiens; identical to SEQ ID NO: 997

SEQ ID NO: 1699 - DNA, 200 bp, Homo sapiens; identical to SEQ ID NO: 1006

SEQ ID NO: 1700 - DNA, 190 bp, Homo sapiens; identical to SEQ ID NO: 1022

SEQ ID NO: 1701 - DNA, 191 bp, Homo sapiens; identical to SEQ ID NO: 1038

SEQ ID NO: 1702 - DNA, 167 bp, Homo sapiens; identical to SEQ ID NO: 1047

SEQ ID NO: 1703 - DNA, 200 bp, Homo sapiens; identical to SEQ ID NO: 1056

SEQ ID NO: 1704 - DNA, 190 bp, Homo sapiens; identical to SEQ ID NO: 1072

SEQ ID NO: 1705 - DNA, 191 bp, Artificial Sequence; identical to SEQ ID NO: 1102
  Description of Artificial Sequence: Synthetic polynucleotide

SEQ ID NO: 1706 - DNA, 165 bp, Artificial Sequence; identical to SEQ ID NO: 1111
  Description of Artificial Sequence: Synthetic polynucleotide

SEQ ID NO: 1707 - DNA, 200 bp, Artificial Sequence; identical to SEQ ID NO: 1120
  Description of Artificial Sequence: Synthetic polynucleotide

SEQ ID NO: 1708 - DNA, 190 bp, Artificial Sequence; identical to SEQ ID NO: 1136
  Description of Artificial Sequence: Synthetic polynucleotide

SEQ ID NO: 1709 - DNA, 191 bp, Artificial Sequence; identical to SEQ ID NO: 1152
  Description of Artificial Sequence: Synthetic polynucleotide

SEQ ID NO: 1710 - DNA, 167 bp, Artificial Sequence; identical to SEQ ID NO: 1161
  Description of Artificial Sequence: Synthetic polynucleotide

SEQ ID NO: 1711 - DNA, 200 bp, Artificial Sequence; identical to SEQ ID NO: 1170
  Description of Artificial Sequence: Synthetic polynucleotide

SEQ ID NO: 1712 - DNA, 190 bp, Artificial Sequence; identical to SEQ ID NO: 1186
  Description of Artificial Sequence: Synthetic polynucleotide

SEQ ID NO: 1713 - DNA, 191 bp, Artificial Sequence; identical to SEQ ID NO: 1216
  Description of Artificial Sequence: Synthetic polynucleotide

SEQ ID NO: 1714 - DNA, 165 bp, Artificial Sequence; identical to SEQ ID NO: 1225
  Description of Artificial Sequence: Synthetic polynucleotide

SEQ ID NO: 1715 - DNA, 200 bp, Artificial Sequence; identical to SEQ ID NO: 1234
  Description of Artificial Sequence: Synthetic polynucleotide

SEQ ID NO: 1716 - DNA, 190 bp, Artificial Sequence; identical to SEQ ID NO: 1250
  Description of Artificial Sequence: Synthetic polynucleotide

SEQ ID NO: 1717 - DNA, 191 bp, Artificial Sequence; identical to SEQ ID NO: 1266
  Description of Artificial Sequence: Synthetic polynucleotide

SEQ ID NO: 1718 - DNA, 167 bp, Artificial Sequence; identical to SEQ ID NO: 1275
  Description of Artificial Sequence: Synthetic polynucleotide

SEQ ID NO: 1719 - DNA, 200 bp, Artificial Sequence; identical to SEQ ID NO: 1284
  Description of Artificial Sequence: Synthetic polynucleotide

SEQ ID NO: 1720 - DNA, 190 bp, Artificial Sequence; identical to SEQ ID NO: 1300
  Description of Artificial Sequence: Synthetic polynucleotide

SEQ ID NO: 1721 - DNA, 113 bp, Homo sapiens
ggcgcagagtcccgcagaggcggacgccgcggcacgcgcctcgaaaagcctcaaactcttatcctcggctctcccgccccacctccgccccgcagccaagacccgcgccgtgg

SEQ ID NO: 1722 - DNA, 111 bp, Homo sapiens
tcaccttgggcttggtggcctgcgtgtcggcggagtcggtgagtgggccaggcggaggatgcgcgcgccgtttagggtgtttgaagctacgagaggagcccgcagggaata

SEQ ID NO: 1723 - DNA, 108 bp, Homo sapiens
gagacgaagagaggcggtgagaacgcgggtgcttagggaccccacccccggctcccgctgggggcccgcgagcggctcggggacgtctgggctggggaagcggggctg

SEQ ID NO: 1724 - DNA, 115 bp, Homo sapiens
ccgcgcgcccgccgcggtccctcccccgcgcccgtccgctcgccgggcccccgccgccgccccggggtgcagccgagcggccgcgccgggtccccgggacggggtggaagtgggg

SEQ ID NO: 1725 - DNA, 113 bp, Homo sapiens
ccacggcgcgggtcttggctgcggggcggaggtggggcgggagagccgaggataagagtttgaggcttttcgaggcgcgtgccgcggcgtccgcctctgcgggactctgcgcc

SEQ ID NO: 1726 - DNA, 111 bp, Homo sapiens
tattccctgcgggctcctctcgtagcttcaaacaccctaaacggcgcgcgcatcctccgcctggcccactcaccgactccgccgacacgcaggccaccaagcccaaggtga

SEQ ID NO: 1727 - DNA, 108 bp, Homo sapiens
cagccccgcttccccagcccagacgtccccgagccgctcgcgggcccccagcgggagccgggggtggggtccctaagcacccgcgttctcaccgcctctcttcgtctc

SEQ ID NO: 1728 - DNA, 115 bp, Homo sapiens
ccccacttccaccccgtcccggggacccggcgcggccgctcggctgcaccccggggcggcggcgggggcccggcgagcggacgggcgcgggggagggaccgcggcgggcgcgcgg

SEQ ID NO: 1729 - DNA, 113 bp, Artificial Sequence
  Description of Artificial Sequence: Synthetic polynucleotide
ggygtagagtttygtagaggyggaygtygyggtaygygtttygaaaagttttaaatttttattttyggttttttygttttattttygtttygtagttaagattygygtygtgg

SEQ ID NO: 1730 - DNA, 111 bp, Artificial Sequence
  Description of Artificial Sequence: Synthetic polynucleotide
ttattttgggtttggtggtttgygtgtyggyggagtyggtgagtgggttaggyggaggatgygygygtygtttagggtgtttgaagttaygagaggagttygtagggaata

SEQ ID NO: 1731 - DNA, 108 bp, Artificial Sequence
  Description of Artificial Sequence: Synthetic polynucleotide
gagaygaagagaggyggtgagaaygygggtgtttagggattttattttyggttttygttgggggttygygagyggttyggggaygtttgggttggggaagyggggttg

SEQ ID NO: 1732 - DNA, 115 bp, Artificial Sequence
  Description of Artificial Sequence: Synthetic polynucleotide
tygygygttygtygyggtttttttttygygttygttygttygtygggttttygtygtygtttyggggtgtagtygagyggtygygtygggttttygggayggggtggaagtgggg

SEQ ID NO: 1733 - DNA, 113 bp, Artificial Sequence
  Description of Artificial Sequence: Synthetic polynucleotide
ttayggygygggttttggttgyggggyggaggtggggygggagagtygaggataagagtttgaggtttttygaggygygtgtygyggygttygtttttgygggattttgygtt

SEQ ID NO: 1734 - DNA, 111 bp, Artificial Sequence
  Description of Artificial Sequence: Synthetic polynucleotide
tattttttgygggtttttttygtagttttaaatattttaaayggygygygtatttttygtttggtttatttatygatttygtygataygtaggttattaagtttaaggtga

SEQ ID NO: 1735 - DNA, 108 bp, Artificial Sequence
  Description of Artificial Sequence: Synthetic polynucleotide
tagtttygtttttttagtttagaygttttygagtygttygygggtttttagygggagtygggggtggggtttttaagtattygygtttttatygttttttttygtttt

SEQ ID NO: 1736 - DNA, 115 bp, Artificial Sequence
  Description of Artificial Sequence: Synthetic polynucleotide
ttttatttttatttygtttyggggattyggygyggtygttyggttgtatttyggggyggyggygggggttyggygagyggaygggygygggggagggatygyggygggygygygg

SEQ ID NO: 1737 - DNA, 113 bp, Artificial Sequence
  Description of Artificial Sequence: Synthetic polynucleotide
ggcgtagagtttcgtagaggcggacgtcgcggtacgcgtttcgaaaagttttaaatttttattttcggttttttcgttttattttcgtttcgtagttaagattcgcgtcgtgg

SEQ ID NO: 1738 - DNA, 111 bp, Artificial Sequence
  Description of Artificial Sequence: Synthetic polynucleotide
ttattttgggtttggtggtttgcgtgtcggcggagtcggtgagtgggttaggcggaggatgcgcgcgtcgtttagggtgtttgaagttacgagaggagttcgtagggaata

SEQ ID NO: 1739 - DNA, 108 bp, Artificial Sequence
  Description of Artificial Sequence: Synthetic polynucleotide
gagacgaagagaggcggtgagaacgcgggtgtttagggattttattttcggttttcgttgggggttcgcgagcggttcggggacgtttgggttggggaagcggggttg

SEQ ID NO: 1740 - DNA, 115 bp, Artificial Sequence
  Description of Artificial Sequence: Synthetic polynucleotide
tcgcgcgttcgtcgcggtttttttttcgcgttcgttcgttcgtcgggttttcgtcgtcgtttcggggtgtagtcgagcggtcgcgtcgggttttcgggacggggtggaagtgggg

SEQ ID NO: 1741 - DNA, 113 bp, Artificial Sequence
  Description of Artificial Sequence: Synthetic polynucleotide
ttacggcgcgggttttggttgcggggcggaggtggggcgggagagtcgaggataagagtttgaggtttttcgaggcgcgtgtcgcggcgttcgtttttgcgggattttgcgtt

SEQ ID NO: 1742 - DNA, 111 bp, Artificial Sequence
  Description of Artificial Sequence: Synthetic polynucleotide
tattttttgcgggtttttttcgtagttttaaatattttaaacggcgcgcgtatttttcgtttggtttatttatcgatttcgtcgatacgtaggttattaagtttaaggtga

SEQ ID NO: 1743 - DNA, 108 bp, Artificial Sequence
  Description of Artificial Sequence: Synthetic polynucleotide
tagtttcgtttttttagtttagacgttttcgagtcgttcgcgggtttttagcgggagtcgggggtggggtttttaagtattcgcgtttttatcgttttttttcgtttt

SEQ ID NO: 1744 - DNA, 115 bp, Artificial Sequence
  Description of Artificial Sequence: Synthetic polynucleotide
ttttatttttatttcgtttcggggattcggcgcggtcgttcggttgtatttcggggcggcggcgggggttcggcgagcggacgggcgcgggggagggatcgcggcgggcgcgcgg

SEQ ID NO: 1745 - DNA, 116 bp, Homo sapiens
tgggcttggtggcctgcgtgtcggcggagtcggtgagtgggccaggcggaggatgcgcgcgccgtttagggtgtttgaagctacgagaggagcccgcagggaataggggagcgcca

SEQ ID NO: 1746 - DNA, 116 bp, Homo sapiens
tggcgctcccctattccctgcgggctcctctcgtagcttcaaacaccctaaacggcgcgcgcatcctccgcctggcccactcaccgactccgccgacacgcaggccaccaagccca

SEQ ID NO: 1747 - DNA, 116 bp, Artificial Sequence
  Description of Artificial Sequence: Synthetic polynucleotide
tgggtttggtggtttgygtgtyggyggagtyggtgagtgggttaggyggaggatgygygygtygtttagggtgtttgaagttaygagaggagttygtagggaataggggagygtta

SEQ ID NO: 1748 - DNA, 116 bp, Artificial Sequence
  Description of Artificial Sequence: Synthetic polynucleotide
tggygtttttttattttttgygggtttttttygtagttttaaatattttaaayggygygygtatttttygtttggtttatttatygatttygtygataygtaggttattaagttta

SEQ ID NO: 1749 - DNA, 116 bp, Artificial Sequence
  Description of Artificial Sequence: Synthetic polynucleotide
tgggtttggtggtttgcgtgtcggcggagtcggtgagtgggttaggcggaggatgcgcgcgtcgtttagggtgtttgaagttacgagaggagttcgtagggaataggggagcgtta

SEQ ID NO: 1750 - DNA, 116 bp, Artificial Sequence
  Description of Artificial Sequence: Synthetic polynucleotide
tggcgtttttttattttttgcgggtttttttcgtagttttaaatattttaaacggcgcgcgtatttttcgtttggtttatttatcgatttcgtcgatacgtaggttattaagttta

SEQ ID NO: 1751 - DNA, 20 bp, Artificial Sequence
  Description of Artificial Sequence: Synthetic primer
ggygtagagtttygtagagg

SEQ ID NO: 1752 - DNA, 22 bp, Artificial Sequence
  Description of Artificial Sequence: Synthetic primer
ttattttgggtttggtggtttg

SEQ ID NO: 1753 - DNA, 23 bp, Artificial Sequence
  Description of Artificial Sequence: Synthetic primer
gagaygaagagaggyggtgagaa

SEQ ID NO: 1754 - DNA, 25 bp, Artificial Sequence
  Description of Artificial Sequence: Synthetic primer
tygygygttygtygyggtttttttt

SEQ ID NO: 1755 - DNA, 22 bp, Artificial Sequence
  Description of Artificial Sequence: Synthetic primer
ccacgacrcgaatcttaactac

SEQ ID NO: 1756 - DNA, 21 bp, Artificial Sequence
  Description of Artificial Sequence: Synthetic primer
tattccctacgaactcctctc

SEQ ID NO: 1757 - DNA, 24 bp, Artificial Sequence
  Description of Artificial Sequence: Synthetic primer
caaccccrcttccccaacccaaac

SEQ ID NO: 1758 - DNA, 19 bp, Artificial Sequence
  Description of Artificial Sequence: Synthetic primer
ccccacttccaccccgtcc

SEQ ID NO: 1759 - DNA, 16 bp, Artificial Sequence
  Description of Artificial Sequence: Synthetic primer
tgggtttggtggtttg

SEQ ID NO: 1760 - DNA, 21 bp, Artificial Sequence
  Description of Artificial Sequence: Synthetic primer
taacrctcccctattccctac

SEQ ID NO: 1761 - DNA, 22 bp, Artificial Sequence
  Description of Artificial Sequence: Synthetic primer
ctcrtcctcctaccrcaaaata

SEQ ID NO: 1762 - DNA, 19 bp, Artificial Sequence
  Description of Artificial Sequence: Synthetic primer
gttgtttaggttgtaggtg

1-18. (canceled)

19. A method of treating a subject having colorectal cancer or neoplasia, comprising the step of treating the subject with chemotherapy, radiation therapy and/or with cancer resection or neoplasia resection; wherein said subject has been determined to DNA methylation as detected assay in a bisulfite converted DNA for retention of a cytosine base of one or more of the Y positions present in one or more of the nucleotide sequences having at least 90% identical to the sequence of any one or more of SEQ ID NOs: 101-200, 401-500, 691-780, 1099-1212, 1351-1374, 1423-1446, 1489-1506, 1577-1602, 1637-1644, 1661-1668, 1681-1684, 1705-1712, 1729-1736 or 1747-1748.

20. A bisulfite converted sequence comprising a nucleotide sequence having at least 90% identity to the sequence of any one or more of SEQ ID NOs: 101-300, 401-600, 691-870, 1099-1326, 1351-1398, 1423-1470, 1489-1524, 1577-1628, 1637-1652, 1661-1676, 1681-1688, 1705-1720, 1729-1744, or 1747-1750, and the reverse complements thereof, including all unique fragments of these sequences and their reverse complements.

21. A panel of bisulfite converted sequences selected from SEQ ID NOs: 101-300, 401-600, 691-870, 1099-1326, 1351-1398, 1423-1470, 1489-1524, 1577-1628, 1637-1652, 1661-1676, 1681-1688, 1705-1720, 1729-1744, or 1747-1750, and the reverse complements thereof, including all unique fragments of these sequences and their reverse complements.

22. The panel of claim 21, wherein the panel corresponds to the combination of sequence regions comprising any one or more of the following combinations of sequences: 1) UnUp62 and UnUp229; 2) UnUp62, UnUp100, UnUp106, UnUp177, UnUp207, UnUp229 and UnUp307; 3) UnUp106 and UnUp146; 4) UnUp280 and UnUp307; 5) UnUp254 and UnUp307; 6) UnUp146 and
UnUp254; 7) UnUp177 and UnUp307; 8) UnUp146 and UnUp307; 9) UnUp106 and UnUp307; 10) UnUp106, UnUp177 and UnUp307; 11) UnUp106, UnUp254, and UnUp307; 12) UnUp106, UnUp280 and UnUp307; 13) UnUp177, UnUp254
and UnUp307; 14) UnUp177, UnUp280 and UnUp307; 15) UnUp106, UnUp146, UnUp280 and UnUp307; 16) UnUp106, UnUp146, UnUp254 and UnUp307; 17) UnUp146, UnUp177, UnUp254 and UnUp307; or 18) UnUp106, UnUp207 and UnUp307.

23. The panels of claim 21, wherein the panels correspond to the combination of sequence regions corresponding to UnUp106, UnUp146, UnUp207, and UnUp307.

24. The panel of claim 22, wherein the panel further comprises the vimentin sequence.

25. The panel of claim 24, wherein the panel corresponds to the combination of sequence regions corresponding to vimentin and UnUp146.

26. An oligonucleotide primer or probe that hybridizes to any of the sequences of claim 20.

27. (canceled)

28. The primers or probes of claim 26, wherein such primers or probes comprise any sequence having at least 90% sequence identity to any one or more of SEQ ID NOs: 1525-1550, 1689-1696 or 1751-1760.

29-35. (canceled)

36. A method for selecting an individual to undergo a diagnostic procedure to determine the presence of colon neoplasia, colon adenoma, colon cancer, or recurrence of colon cancer within the body, by obtaining a biological sample from an individual, and determining the presence in DNA from that sample of DNA methylation as detected assay in a bisulfite converted DNA for retention of a cytosine base present in any one or more of the nucleotide sequences having at least 90% identical to the sequence of any one or more of SEQ ID NOs: 101-300, 401-600, 691-870, 1099-1326, 1351-1398, 1423-1470, 1489-1524, 1577-1628, 1637-1652, 1661-1676, 1681-1688, 1705-1720, 1729-1744, or 1747-1750.

37. (canceled)

38. A method for selecting an individual to undergo a treatment for colon neoplasia, colon adenoma, colon cancer, or recurrence of colon cancer, by obtaining a biological sample from an individual, and determining the presence in DNA from that sample of DNA methylation as detected assay in a bisulfite converted DNA for retention of a cytosine base present in any one or more of the nucleotide sequences having at least 90% identical to the sequence of any one or more of SEQ ID NOs: 101-300, 401-600, 691-870, 1099-1326, 1351-1398, 1423-1470, 1489-1524, 1577-1628, 1637-1652, 1661-1688, 1681-1696, 1705-1720, 1729-1744, or 1747-1750.

39-40. (canceled)

41. The method of claim 36, wherein the bisulfite converted sequences are detected using any of: DNA sequencing, next generation sequencing, methylation specific PCR, methylation specific PCR combined with a fluorogenic hybridization probe, real time methylation specific PCR.

42. (canceled)

43. The method of claim 36, wherein the biological sample is a tissue sample or a body fluid.

44. (canceled)

45. The method of claim 43, wherein the body fluid is blood, saliva, spit, stool, or urine or a colonic lavage.

46. (canceled)

47. A method for determining the response of an individual with colorectal cancer to therapy by detection in a body fluid of methylation in any one or more of the nucleotide sequences having at least 90% identical to the sequence of any one or more of SEQ ID NOs: 101-300, 401-600, 691-870, 1099-1326, 1351-1398, 1423-1470, 1489-1524, 1577-1628, 1637-1652, 1661-1676, 1681-1688, 1705-1720, 1729-1744, or 1747-1750; wherein increasing levels of methylation over time are indicative of disease progression and a need for change to a new therapy, and wherein absence of increase in levels of methylation over time or decrease in levels of methylation over time are indicative that change in therapy is not required.

48. The method of claim 47, wherein DNA methylation is detected by bisulfite converting DNA from a body fluid and detecting the presence of any of the bisulfite converted DNA sequences of claim 20.

49. A bisulfite-converted nucleotide sequence comprising a sequence having at least 80%, 85%, 90%, 91%, 92%, 93%, 94%, 95%, 96%, 97%, 98%, 99% or 100% identity to any of the following sequences SEQ ID NO: 1705-1720, 1577-1628, 1729-1744, and 1747-1750.

50. The bisulfite-converted nucleotide sequence of claim 49, wherein the sequence comprises a sequence having at least 80%, 85%, 90%, 91%, 92%, 93%, 94%, 95%, 96%, 97%, 98%, 99% or 100% identity to any of the following sequences SEQ ID NO: 1705-1720.

51. The bisulfite-converted nucleotide sequence of claim 50, wherein the sequence comprises a sequence having at least 80%, 85%, 90%, 91%, 92%, 93%, 94%, 95%, 96%, 97%, 98%, 99% or 100% identity to 1706, 1710, 1714 or 1718.

52. (canceled)

53. A method of treating a subject having a colorectal neoplasia, comprising the step of treating the subject with chemotherapy, radiation therapy and/or with the resection of the neoplasia; and/or with ablation of the neoplasia; wherein said subject has been determined to have DNA methylation by assay in a bisulfite converted DNA for retention of a cytosine base of one or more of the Y positions present in one or more of the nucleotide sequences having at least 90% identity to the sequence of any one or more of: SEQ ID NOs: 101-300, 401-600, 691-870, 1099-1326, 1351-1398, 1423-1470, 1489-1524, 1577-1628, 1637-1652, 1661-1688, 1681-1696, 1705-1720, 1729-1744, or 1747-1750.

54. The method of claim 38, wherein the bisulfite converted sequences are detected using any of: DNA sequencing, next generation sequencing, methylation specific PCR, methylation specific PCR combined with a fluorogenic hybridization probe, real time methylation specific PCR.

55. The method of claim 38, wherein the biological sample is a tissue sample or a body fluid.

56. The method of claim 55, wherein the body fluid is blood, saliva, spit, stool, or urine or a colonic lavage.
